United States Patent Application Publication US 2025/0264482 A1 - sequence listing, part 3

SEQ ID NO: 22668 - protein, 96 aa, Homo sapiens
AASGFTFSSYWMSWVRQAPGKGLEWVANIKQDGSETYYVDSVKGRFTISRDNAKDSLYLQMNSLRAEDTAVYYCARSPSSTFYSYWGQGTLVTVSS

SEQ ID NO: 22669 - protein, 96 aa, Homo sapiens
AASGFTFSSYWMSWVRQAPGKGLEWVANIRQDGSEEYYVDSVKGRFTISRDNAKNSLYLQMNSLRAEDTAMYYCARSPSSTFYSYWGQGTLVTVSS

SEQ ID NO: 22670 - protein, 96 aa, Homo sapiens; identical to SEQ ID NO: 22668

SEQ ID NO: 22671 - protein, 96 aa, Homo sapiens; identical to SEQ ID NO: 22668

SEQ ID NO: 22672 - protein, 96 aa, Homo sapiens; identical to SEQ ID NO: 22667

SEQ ID NO: 22673 - protein, 96 aa, Homo sapiens
AASGFTFSSYWMSWVRQAPGKGLEWVANIRQDGSEEYYVDSVKGRFTISRDNAKNSLYLRMNSLRAEDTAMYYCARSPSSTFYSYWGQGTLVTVSS

SEQ ID NO: 22674 - protein, 96 aa, Homo sapiens
AASGFTFSSYWMSWVRQAPGKGLEWVANIRQDGSEEYYVDSVKGRFTISRDNAKNSLYLQMNSLRAEDTAMYFCARSPSSTFYSYWGQGTLVTVSS

SEQ ID NO: 22675 - protein, 96 aa, Homo sapiens
AASGFTFKSYWMSWVRQAPGKGLEWVANIKQDGSETYYVDSVKGRFTISRDNAKDSLYLQMNSLRAEDTAVYYCARSPSSTFYSYWGQGTLVTVSS

SEQ ID NO: 22676 - protein, 96 aa, Homo sapiens; identical to SEQ ID NO: 22667

SEQ ID NO: 22677 - protein, 96 aa, Homo sapiens; identical to SEQ ID NO: 22667

SEQ ID NO: 22678 - protein, 96 aa, Homo sapiens; identical to SEQ ID NO: 22667

SEQ ID NO: 22679 - protein, 96 aa, Homo sapiens
AASGFTFSTYWMSWVRQAPGKGLEWVANIRQDGSEEYYVDSVKGRLTISRDNAKNSLYLQMNSLRAEDTAMYYCARSPSSTFYSYWGQGTLVTVSS

SEQ ID NO: 22680 - protein, 96 aa, Homo sapiens; identical to SEQ ID NO: 22667

SEQ ID NO: 22681 - protein, 93 aa, Homo sapiens
AASGFTFSNFWMHWVRQVPGRGLIWVARISDDGRTTTYADFVEGRFTISRDNARNKLYLQMHSLGVDDTGLYFCTRDRRGWDWGQGTLVTVSS

SEQ ID NO: 22682 - protein, 93 aa, Homo sapiens
AVSGFLFRDYWMHWVRQTPGQGLVWVARISDDGRTTTYADSVRGRFTISRDNAKNRLYLQMNSLREEDTAVYYCTRDRRGWDWGQGTQVTVSS

SEQ ID NO: 22683 - protein, 93 aa, Homo sapiens
EVSGFTFSDFWMHWVRQVPGRGLQWVARISEDGRTTTYADSVRGRFTISRDNARNRLFLQMNGVTEEDTARYYCTRDRRGWDWGQGTLVIGSS

SEQ ID NO: 22684 - protein, 93 aa, Homo sapiens
EVSGFTFSDFWMHWVRQVPGKRLVWVARISDDGRTTTYADAVRRRFIISRDNASNRLYLQMNRLRAEDTAIYYCTRDRRGWDWGQGTQVTVSS

SEQ ID NO: 22685 - protein, 93 aa, Homo sapiens
AASGFTFNTDWMHWVRQVPGKGLVWVARISEDGRTTNYAESVRGRFTIYRDNARNTLYLQMRTLRVEDTGVYYCTRDRRGWDWGQGTLVTVSS

SEQ ID NO: 22686 - protein, 93 aa, Homo sapiens
AASGFTFNNDWMHWVRQVPGKGLVWVARISEDGRTTDYAESVRGRFTIYRDNARNTLYLQMRTLRVEDTAVYYCTRDRRGWDWGQGTLVTVSS

SEQ ID NO: 22687 - protein, 93 aa, Homo sapiens; identical to SEQ ID NO: 22685

SEQ ID NO: 22688 - protein, 93 aa, Homo sapiens
VGSGFSFNSHWMHWVRLAPGKGLTWVSRISEDGIHTDYADFVRGRFTMSRDNAKNTVYLHMSSLWGEDTAVYYCTRDRRGWDWGQGTLVTVSS

SEQ ID NO: 22689 - protein, 92 aa, Homo sapiens
ASGFTFNTYWMHWVRQAQGKGLVWVARISDNGRHTDYAGSVKGRFTISRDNAKDTLYLQMNSLRAEDAALYYCTRDRRGWDWGQGTLVTVSS

SEQ ID NO: 22690 - protein, 93 aa, Homo sapiens; identical to SEQ ID NO: 22686

SEQ ID NO: 22691 - protein, 93 aa, Homo sapiens
AVSGFLFRDYWMHWVRQTPGQGLAWVSRISDDGRTTTYADSVRGRFTISRDNAKNRLYLQMNSLREEDTAVYYCTRDRRGWDWGQGTQVTVSS

SEQ ID NO: 22692 - protein, 93 aa, Homo sapiens
AVSGFLFRDFWMHWVRQTPGQGLVWVSRISDDGRTTTYADSVRGRFTISRDNARNRLYLQMNSLREEDTAVYYCTRDRRGWDWGQGTQVTVSS

SEQ ID NO: 22693 - protein, 93 aa, Homo sapiens
AVSGFLFRDYWMHWVRQTPGQGLVWVSRISDDGRTTTYADSVRGRFTISRDNAKNRLYLQMNSLREEDTAVYYCTRDRRGWDWGQGTQVTVSS

SEQ ID NO: 22694 - protein, 93 aa, Homo sapiens
AVSGFLFRDFWMHWVRQIPGQGLVWVSRISDDGRTTTYADSVRGRFTISRDNAKNRLYLQMNSLREEDTAVYYCTRDRRGWDWGQGTQVTVSS

SEQ ID NO: 22695 - protein, 93 aa, Homo sapiens
EVSGFIFSDFWMHWVRQLPGKGLVWVARISEDGRTTTYAESVRGRFTISRDTARNRLYLEMSSLREEDTAVYYCTRDRRGWDWGQGTLVTVSS

SEQ ID NO: 22696 - protein, 100 aa, Homo sapiens
AASGFTFNIYAIHWVRQAPGKGLEWVAVISSDGSVKYYTESVKGRFTISRDNSKNTLYLQMNSLRVEDTAVYYCARDPVGATSPRYFDYWGQGTLVTVSS

SEQ ID NO: 22697 - protein, 100 aa, Homo sapiens
AASGFAFSTYTMHWVRQAPGKGLEWLTVISSDGSLKFYADSVRGRITISRDNSKNTLYLQMDRLRVDDTAVFYCARDPVGATSPRYFDYWGQGTLVTVSS

SEQ ID NO: 22698 - protein, 97 aa, Homo sapiens
AASGFTFRTYAMHWVRQAPGKGLEWVAYISIDESKKYYADSVKGRFAISRDNSKNTLYLQMNSLRAEDTAVYYCAKDTPDILGLDYWGQGSLVTVSS

SEQ ID NO: 22699 - protein, 95 aa, Homo sapiens
VASGFTFSNYAMHWVRQAPGKGLEYVSYIGYGNQYYADSVRGRFTISRDNSKSTLYLQMNSLRPEDTAVYYCAKDTPDILGLDYWGQGTLVTVSS

SEQ ID NO: 22700 - protein, 99 aa, Homo sapiens
AASGFTFSRNWMSWVRQAPGKGLEWVASIKEDGSETSYVDSVKGRFTISRDNAKNSLSLQMNSLRAEDTAMYYCARSPYSTRYNWFGPWGQGTLVTVSS

SEQ ID NO: 22701 - protein, 99 aa, Homo sapiens
AASGFTFSSSWMSWVRQAPVKGLEWVASINENGNEEYYVDSVKGRFNISRDNAKNSLFLQMNSLRAEDTAVYYCARSPYSTRYNWFGPWGQGTLVTVSS

SEQ ID NO: 22702 - protein, 99 aa, Homo sapiens; identical to SEQ ID NO: 22701

SEQ ID NO: 22703 - protein, 94 aa, Homo sapiens
AASGFTFSNAWMSWVRQAPGKGLEWVGRIKSKTDGGTIEYAAPVKGRFTLSRDDSKNTLYLQMNSLKGEDTAVYYCTTLGYRPWGQGTLVTVSS

SEQ ID NO: 22704 - protein, 94 aa, Homo sapiens
AASGFTFSNAWMSWVRQAPGKGLEWVGRIKSKTDGGTTDYAAPVKGRFTISRDDSKNMLYMQMNSLKIEDTAVYYCTTLGYRPWGQGTLVTVSS

SEQ ID NO: 22705 - protein, 96 aa, Homo sapiens
AASGFTFSSYAMNWVRQAPGKGLEWVSAVTGDADATYYADSVKGRFTISRDNSKNTLYLQMNSLRAEDTAIYYCAKRGSGWYMDYWGQGTLVTVSS

SEQ ID NO: 22706 - protein, 96 aa, Homo sapiens
AASGFTFNTYAMSWVRQAPGKGLEWVSGIGGGGGSTYYADSVKGRFTISRDNSKNTLYLQMNSLRAEDTALYYCAKRGSGWYMDYWGQGTLVTVSS

SEQ ID NO: 22707 - protein, 101 aa, Homo sapiens
ASGYTFTGYYMHWVRQAPGQGLEWMGWINPDSGGTNYAQRFQGRVTMTGDTPISTAYMELSRLRSDDTAVYYCARVVRDGYNSGLYYFDYWGQGTLVTVSS

SEQ ID NO: 22708 - protein, 101 aa, Homo sapiens
ASGYTFTGYYMHWMRQAPGQGLEWMGWIDPNSGATKYAQNFQGRVTMTTDTSISTAYMELSRLRSDDTAVIYCARVVRDGYNSGLYYFDYWGLGSLVTVSS

SEQ ID NO: 22709 - protein, 95 aa, Homo sapiens
AASGFTFDDYAMHWVRQAPGKGLEWVSGISWNSGSIGYADSVKGRFTISRDNAKNSLYLQMNSLRAEDTALYYCARNSGYDFDYWGQGTLVTVSS

SEQ ID NO: 22710 - protein, 95 aa, Homo sapiens
AASGFTFDDYAMHWVRQAPGKGLEWVSTITWNSGVIDYADSVKGRFTISRDNAKNSLYVQMNSLRAEDTALYYCARNSGYDFDYWGQGTLVTVSS

SEQ ID NO: 22711 - protein, 95 aa, Homo sapiens
AASGFTFDDYAMHWVRQAPGKGLEWVSTISWNSGVIDYADSVKGRFTISRDNAKNSLYVQMNSLRAEDTALYYCARNSGYDFDYWGQGTLVTVSS

SEQ ID NO: 22712 - protein, 95 aa, Homo sapiens
AASGFTFDDYGMHWVRQAPGKGLEWVSTISWNSGVIDYADSVKGRFTISRDNAKNSLYVQMNSLRAEDTAFYYCARNSGYDFDYWGQGTLVTVSS

SEQ ID NO: 22713 - protein, 93 aa, Homo sapiens
AASGFTFSSYAMSWVRQAPGKGLEWVSAISGSGGSTYYADSVKGRFTISRDNSKDTLYLQMNSLRADDTAVYYCAKPFGMDVWGQGTTVTVSS

SEQ ID NO: 22714 - protein, 92 aa, Homo sapiens
AASGFTFSNSAMSWVRQAPGKGLEWVSSIGGGGGRYYADSVKGRFTISKDISKNTLYLQMDSLRVEDTAVYFCAKPFGMDVWGQGTTVTVSS

SEQ ID NO: 22715 - protein, 94 aa, Homo sapiens
ASGYSFTTYAMHWVRQAPGQRLEWMGWINPGNGNTKYSQTLQGRVTFTRDTSASTAYMELSSLRSEDTAVYYCARRAPAGIDYWGQGTLVTVSS

SEQ ID NO: 22716 - protein, 94 aa, Homo sapiens
ASGYSFTTYAMHWVRQAPGQRLEWMGWINPGNGNTKYSQTLQGRVTFTRDTSASTAYMELSRLRSEDTAVYYCARRAPAGIDYWGQGTLVTVSS

SEQ ID NO: 22717 - protein, 94 aa, Homo sapiens
ASGYSFTTYAMHWVRQAPGQRLEWMGWINPGNGNTKYSQTLQGRVTFTRDTSASTAYMELSSLRSEDTAEYYCARRAPAGIDYWGQGTLVTVSS

SEQ ID NO: 22718 - protein, 94 aa, Homo sapiens
ASGYTFTSNAIHWVRQAPGQRLEWMGWINTGNGDTKYSQSFQGRVTFTRDTSANTAYMEMSSLKSEDTAMFYCARRAPAGIDYWGQGTLVTVSS

SEQ ID NO: 22719 - protein, 94 aa, Homo sapiens
ISGDSVSNNVGAWNWIRQSPSGGLEWLGRTYYRSEWHFDYAESLRGRIAIKPDTSKNQFSLHLTSVTPEDTAVYFCASGWALQWGPGTPVTVSS

SEQ ID NO: 22720 - protein, 94 aa, Homo sapiens
ISGDSVSNNVGAWNWIRQSPSGGLEWLERTYYRSEWHFDYAESLRGRIAIKPDTSKNQFSLHLTSVTPEDTAVYFCASGWALQWGPGTPVTVSS

SEQ ID NO: 22721 - protein, 94 aa, Homo sapiens
ISGDTVASETAAWNWIRQSPSRGLEWLGRTYFRSKWFHDYAVSVQSRISITADTSKNQLFLQLNSVTPEDTAVYYCASGWALQWGQGSLVTVSS

SEQ ID NO: 22722 - protein, 94 aa, Homo sapiens
ISGDSVASETDAWNWIRQSPSRGLEWLGRTYFRSKWFHDYADSVKSRINITSDTSRNQLFLQLKSVTPEDTAVYYCASGWALQWGQGSQVTVSS

SEQ ID NO: 22723 - protein, 91 aa, Homo sapiens
ASGYTFTEYYIHWVRQAPGQGLEWMGWVYPSTGGTNYAQKFQGRVTMTRDMSISTAYMELSRLRSDDTAVYYCARSTTGYWGQGTLVTVSS

SEQ ID NO: 22724 - protein, 91 aa, Homo sapiens
ASGYTFTEYYIHWVRQAPGQGLEWMGWVYPTTGGTNYAQKFQGRVTMTRDMSISTAYMELSRLTSDDTAVYYCARSTTGYWGQGTLVTVSS

SEQ ID NO: 22725 - protein, 91 aa, Homo sapiens
ASGYTFTEYYIHWVRQAPGQGLEWMGWVYPSTGGTNYAQKFRGRVTMTRDMSISTAYMELSRLRSDDTAVYYCARSTTGYWGQGTLVTVSS

SEQ ID NO: 22726 - protein, 90 aa, Homo sapiens
FGYTFTTYYIHWVRQAPGQGLEWMGYINPNNGGTNYAEKFQGRVTMTRDTSISTAYMELTMLTSADTAHYYCARSTTGYWGQGTLVTVSS

SEQ ID NO: 22727 - protein, 90 aa, Homo sapiens
FGYTFTTYYIHWVRQAPGQGLEWMGYINPNNGGTNYAEKFQGRVTMTRDTSISTAYMELTMLTSADTAHYYCARSTTGYWGQRTLVTVSS

SEQ ID NO: 22728 - protein, 94 aa, Homo sapiens
ISGDSVSSNSAAWNWIRQSPSRGLEWLGRTYYRSKWYYGYAVSVKSRITISPDTSKNQFSLQLNSVTPEDTAMYYCTRDPTGNWGQGTLVTVSS

SEQ ID NO: 22729 - protein, 94 aa, Homo sapiens; identical to SEQ ID NO: 22728

SEQ ID NO: 22730 - protein, 94 aa, Homo sapiens
ISGDSVSSNSAAWNWIRQSPSRGLEWLGRTYYRSKWYYGYAVSVKSRITINPDTSKNQFSLHLNSVTPEDTAVYYCTRDPTGNWGQGTLVTVSS

SEQ ID NO: 22731 - protein, 94 aa, Homo sapiens
AASGFTFSNYWMTWVRQAPGKGLEWVANIKQDENEKYYVDSVKGRFTISRDNANNSLFLQMNSLRAEDTAVYYCGRGRQPIDYWGQGTLVTVSS

SEQ ID NO: 22732 - protein, 94 aa, Homo sapiens
AASGFTFSNYWMTWVRQAPGKGLEWVANIRQDESEKYYVDSVKGRFTISRDNTKNSVYLQMNSLRAEDTAVYYCGRGRQPIDYWGQGTLVTVSS

SEQ ID NO: 22733 - protein, 95 aa, Homo sapiens
AASGLTFTKYWMHWVRQRPGKGLVWVSRISGDGSETEYADSVKGRFTVSRDNSKNTLYLQMNSLRVDDTGVYYCARSTVLRGVHWGQGTLVTVSS

SEQ ID NO: 22734 - protein, 94 aa, Homo sapiens; identical to SEQ ID NO: 21518

SEQ ID NO: 22735 - protein, 90 aa, Homo sapiens
AVSGITFNWLDWVRQAPGKGLVWVSRIKSDGTTTRYADSAKGRFTISRDNAKNTVHLQMNSLGAEDTAVYYCVTMPPGYWGQGTLVTVSS

SEQ ID NO: 22736 - protein, 90 aa, Homo sapiens
AVSGFTFNWLDWVRQAPGKGLVWVSRIKSDGSSTRYADSVKGRFTISRDNAKNTVHLQMNSLRAEDTAVYYCVTMPPGYWGQGTLVTVSS

SEQ ID NO: 22737 - protein, 90 aa, Homo sapiens
AVSGSTFNWLDWVRQAPGKGLEWVSRIKSDGSSPRYADSVKGRFTISRDNAENTVHLQMNSLRAEDTAVYYCVTMPPGYWGQGTLVTVSS

SEQ ID NO: 22738 - protein, 92 aa, Homo sapiens
AVSGFPFSSYWLDWVRQAPGKGLVWVSRIKSDGSFTRYADSVKGRFTISRDNAKNTVHLQMNSLRAEDTAVYYCVTMPPGYWGQGTLVTVSS

SEQ ID NO: 22739 - protein, 90 aa, Homo sapiens
AVSGVTFNWLDWVRQVPGKGLEWVSRIKSDGSSPRYADSVKGRFTISRDSAKNTVHLQMNSLRAEDTAVYYCVTMPPGYWGQGTLVTVSS

SEQ ID NO: 22740 - protein, 92 aa, Homo sapiens
AVSGFTFGTYWLDWVRQAPGKGLVWVSRIHSDDNKAIYADSVKGRFTISRNQAKNTFYLQMNSLTDDDTAVYYCVTMPPGYWGQGTLVTVSS

SEQ ID NO: 22741 - protein, 96 aa, Homo sapiens
AASGFTFSAYAMTWVRQAPGKGLEWVSAISGSSINTHYADSVKGRFTISRDNSKNTLYLQMNSLRDEDTAVYYCAKGPVAVDFDYWGQGTLVTVSS

SEQ ID NO: 22742 - protein, 96 aa, Homo sapiens
AASGFTFSAYAMTWVRQAPGKGLEWVSTISGSSVNTHYADSVKGRFTISRDNSYNTLYLQMNSLRDEDTAVYYCAKGPVAVDFDYWGQGTRVAVSS

SEQ ID NO: 22743 - protein, 96 aa, Homo sapiens
AASGFSFSRYAMTWVRQAPGKGLEWVSTISGSGGNTHYADSVKGRFTISRDNSKNTLYLQMNSLRAIDTAVYYCAKGPVAVDFDYWGQGTLVTVSS

SEQ ID NO: 22744 - protein, 96 aa, Homo sapiens; identical to SEQ ID NO: 22743

SEQ ID NO: 22745 - protein, 98 aa, Homo sapiens
AASGFTFSNYAMNWVRQAPGKGLEWVSGIGESGDTTYYADSVKGRFTISRDNSKNTLYLQMDSLRAEDTAVYYCAKATGYDILTGLDYWGQGTLVTVS

SEQ ID NO: 22746 - protein, 98 aa, Homo sapiens; identical to SEQ ID NO: 22745

SEQ ID NO: 22747 - protein, 98 aa, Homo sapiens
AASGFTFSNYAMNWVRQAPGKGLEWVSGIGESGDTTYYADSVKGRFTISRDNSKNTLFLQMDSLRAEDTAVYYCAKATGYDILTGLDYCGQGTLVTVS

SEQ ID NO: 22748 - protein, 99 aa, Homo sapiens
AASGFTLSSYAMSWVRQAPGKGLEWVSTISGSGGSTYYADSVKGRFTISRDGSKNTLHLQMNSLRADDTAIYYCAKATGYDILTGLDYWGQGTLVTVSS

SEQ ID NO: 22749 - protein, 94 aa, Homo sapiens
AASGFTFSSYSMNWVRQAPGKGLEWVSSISSTSTYIYYADSVKGRFTISRDNAKNSLYLQMNGLRADDTAVYYCARGGRVTADWGQGTLVTVSS

SEQ ID NO: 22750 - protein, 94 aa, Homo sapiens
AASGFTFSSYSMNWVRQAPGKGLEWVSSISSSSSYIYYADSVKGRFTISRDNAKNSLFLQMNSLRAEDTAVYYCARGGRVTADWGQGTLVTVSS

SEQ ID NO: 22751 - protein, 96 aa, Homo sapiens
AASGFTFSSYEMNWVRQAPGKGLEWVSYISTSGSPIYYADSVKGRFSISRDNAKNSLYLRMTSLRAEDTAVYYCARDQGLYAFDIWGQGTMVTVSS

SEQ ID NO: 22752 - protein, 96 aa, Homo sapiens
AASEFTFNNYEMNWVRQAPGKGLEWISYISSSGNTIYYADSVRGRFTISRDNAKNSLYLQMNSLRAEDTALYYCARDQGLYAFDIWGQGTMVTVSS

SEQ ID NO: 22753 - protein, 99 aa, Homo sapiens
VASGLIFSGADMHWVRQASGKGLEWVGRVRSKRNNYATVYAASVKGRFTISRDDSKNTAFLQMNSLKSEDTAVYYCVHYGSGSYSTDYWGQGTLVTVSS

SEQ ID NO: 22754 - protein, 99 aa, Homo sapiens
AASGFTFSGAEMHWVRQASGKGLEWVGRIRNKANSYATTYVASVRGRFTISRDDSKNTAYLQMNSLKTEDTAVYYCVHYGSGSYSTDYWGQGTLVTVSS

SEQ ID NO: 22755 - protein, 101 aa, Homo sapiens
AASEFTFSTHGIHWVRQAPGKGLEWVAVISYDGSNTHYADSVKGRFTISRDNSKNSVYLQMNSLTPEDTAVYYCAKGGGTIAAPGHAFDFWGQGTMVTVSS

SEQ ID NO: 22756 - protein, 100 aa, Homo sapiens
ASGFTFSTHGIHWVRQAPGKGLEWLVVISHDGSNIKYADSVKGRFTISKDNSRNTVYLQMNTLGPEDTAVYYCAKGGGTIAAPGHAFDFWGQGTMVTVSS

SEQ ID NO: 22757 - protein, 92 aa, Homo sapiens
EASGFTFSSYAMSWVRQAPGKGLEWVSGISGSGGSTYYADSVKGRFTISRDNSKNTLYLQMQSLRVEDTATYYCFGARLDYWGQGSLVTVSS

SEQ ID NO: 22758 - protein, 92 aa, Homo sapiens
VASGFTFSSYAMSWVRQAPGKGLEWVSTISGSGGKTYYADSVKGRFTISRDNSKNTLYVQMNSLRDEDTAVYYCFGARLDYWSQGTLVTVSS

SEQ ID NO: 22759 - protein, 100 aa, Homo sapiens
AASGFTFSSYAMSWVRQVPGKGLEWVSAISGSADSTYYADSVTGRFTISRDNSKKRLYLQLNSLRAEDTAIYYCAKDQVVTAIQGRFGYWGQGTQVTVSS

SEQ ID NO: 22760 - protein, 100 aa, Homo sapiens
AASGFTFNTYAMTWVRQAPGKGLEWVSGISGSGDSTYYADSVTGRFTISRDNSKKMLYLQLNSLRAEDTAIYYCAKDQVVTAIQGRFGYWGQGTQVTVSS

SEQ ID NO: 22761 - protein, 100 aa, Homo sapiens
AASGFTFSIYAMSWVRQAPGKGLEWVSGISGSGDSTYYADSVKGRFSISRDNSKNTLYLQMKTLRAEDTAVYYCAKDQVVTAIQGRFGYWGQGTLVTVSS

SEQ ID NO: 22762 - protein, 92 aa, Homo sapiens
AASGFIVSSNSMNWVRQAPGKGLEWVSVIHGGGSIHFSDSVKGRFTMSRDNSKNTVYLQMNSLKVEDTAVYYCARHAWLENWGQGTLLTVSS

SEQ ID NO: 22763 - protein, 92 aa, Homo sapiens
AASGFTVSSNSMNWVRQAPEKGLEWVSVTHSDGSRYYADSVKGRFTISRDDSKNTLYLQMNSLRVEDTAVYYCARHAWLENWGQGTLVTVSS

SEQ ID NO: 22764 - protein, 95 aa, Homo sapiens
AASGFTFSSYWMSWVRQAPGKGLEWVAKIKEDGSEKYYVDSVKGRFTISRDNAKNSLYLQMNSLRAEDTAVYYCARGGWRRFDYWGQGTLVTVSS

SEQ ID NO: 22765 - protein, 95 aa, Homo sapiens
AASGFTFNTYWMSWVRQAPGKGLEWVASIKEDGSEKYHVDSVKGRFSISRDNAKNSLYLQMNSLRAEDTAVYYCARGGWRRFDYWGQGTLVTVSS

SEQ ID NO: 22766 - protein, 95 aa, Homo sapiens
EASGFTFSRHWMHWVRQAPGKGLVWVSRLNPDGSITHYADSVKGRFTISRDNAKNTLYLQMNSLRVEDTAVYFCVREGNWDLDYWGQGTRVTVSS

SEQ ID NO: 22767 - protein, 95 aa, Homo sapiens
AASSFTFSRHWMHWVRQAPGKGLVWVSRLNPDGSETAYADSVKGRFTISRDNTKNTLYLRMDSLRVEDTALYYCVREGNWDLDYWGQGALVTVSS

SEQ ID NO: 22768 - protein, 93 aa, Homo sapiens
AASGFTFSDYTMNWVRQAPGKGLEWISYIPSTSTPIYYADSVKGRFTVSRDNVKNSLYLQMDSLRDEDTALYYCARDRLLDSWGQGTLVTVSS

SEQ ID NO: 22769 - protein, 93 aa, Homo sapiens; identical to SEQ ID NO: 22768

SEQ ID NO: 22770 - protein, 93 aa, Homo sapiens
AASGFPFSDYTMNWVRQAPGKGLEWISYIPSSSAPIYYADSVKGRFTVSRDNVKNSLYLQMHSLRDEDTALYYCARDRLLDSWGQGTLVTVSS

SEQ ID NO: 22771 - protein, 93 aa, Homo sapiens
AATGFTFSSSSMNWVRQAPGKGLEWLSHISSSGNSIFYADSVKGRFTISRDNAKTSLYLQMNSLRDEDTAVYYCARDRLLDSWGQGTLVTVSS

SEQ ID NO: 22772 - protein, 93 aa, Homo sapiens
ASGFTFRNSAVQWLRQARGQRLEWVGWIVVGSGNTNYAQKFQGRVTITRDMSTSTAYMELSGLTSADTAVYYCAADDILTAFWGQGTLVTVSS

SEQ ID NO: 22773 - protein, 93 aa, Homo sapiens
ASGLIFTNSAVQWVRQARGQRLEWLGWIVVASGKINYAQKFQERVIISRDMSTNTAYMELNRLASDDTAVYYCAADDILTAFWGQGTLVTVSS

SEQ ID NO: 22774 - protein, 93 aa, Homo sapiens
ASGFTFRTSAVQWVRQARGQRLEWVGWIVVGSGSANYAQKFQGRVTITRDMSTSTAYMELSSLKYDDTAVYYCAADDILTAFWGQGTLVTVSS

SEQ ID NO: 22775 - protein, 93 aa, Homo sapiens
ASGLIFTNSAVQWVRQARGQRLEWLGWIVVASGKTNYAQKFQERVIISRDMSTNTAYMELSRLASDDTAVYYCAADDILTAFWGQGTLVTVSS

SEQ ID NO: 22776 - protein, 93 aa, Homo sapiens
ASGLIFTNSAVQWVRQARGQRLEWLGWIVVASGNTNYAQKFQERVTITRDMSTNTAYMELSSLASDDTAVYYCAADDILTAFWGQGTLVTVSS

SEQ ID NO: 22777 - protein, 93 aa, Homo sapiens
ASGLIFTSSAVQWVRQARGQRLEWLGWIVVASGNTNYAQKFQERVTITRDMSTNTAYMELSSLASDDTAVYYCAADDILTAFWGQGTLVTVSS

SEQ ID NO: 22778 - protein, 99 aa, Homo sapiens
AASGFTFSDAWMSWVRQAPGKGLEWVGRLKSHGSGGTTDYAAPVRGRFTISREDSKNTLYLQMNSLKTEDTGVYYCSWETSPYYGMDVWGKGTTVTVSS

SEQ ID NO: 22779 - protein, 99 aa, Homo sapiens
AASGFTFSDAWMSWVRQAPGKGLEWVGRLKSHGSGGTTDYAAPVRGRFTISREDSKNTLYLQMNSLKTEDTGVYYCSWETSPYYGMDVWGQGTTVTVPS

SEQ ID NO: 22780 - protein, 99 aa, Homo sapiens
AVSGITFSDAWMSWIRQAPGKGLEWVGRIKSQGSGGTTDYAAPVKGRFTISRDDSKNTVYLQIDSLKTEDTGVYYCSWETSPYYGMDVWGQGATVTVSS

SEQ ID NO: 22781 - protein, 93 aa, Homo sapiens
AGSGFTFSDNSMKWVRQAPGKGLEWLSYISGGSDTIYYADSVKGRFTVSRDNAKNLLYLQMNSLRDEDTAVYYCARSHLYDYWGQGTLVTVSS

SEQ ID NO: 22782 - protein, 93 aa, Homo sapiens
AGSGFTFSSYSMKWVRQAPGKGLEWLSYIDGRSEIIYYADSVKGRFTVSRDNAKNSLYLQMNSLRDEDTAVYYCARSHLYDYWGQGTLVTVSS

SEQ ID NO: 22783 - protein, 107 aa, Homo sapiens
TQTLTLTCTFSGFSLSTTGVGVGWIRQPPGKALEWLALIYWDDDKRYSPSLKSRLTITKDTSKNQVVLTMTTINPVDTATYYCAHRRSNGWYDFDYWGQGTLVTVSS

SEQ ID NO: 22784 - protein, 105 aa, Homo sapiens
QTLTLTCTFSGFSLSTSGVGVGWIRQPPGKALEWLALIYWDDDKRYSPSLKSRLTVTKDTSKNQVVLRMTNMDPVDTGTYYCAHRRSNGWYDFDYWGQGTLVTVS

SEQ ID NO: 22785 - protein, 107 aa, Homo sapiens
TQTLTLTCTFSGFSLTTSGVGVGWIRQPPGKALEWLALIYWDDDKRYSPSLKSRLTITKDTSKNQVVLTLTNMDPVDTATYYCAHRRSNGWYDFDYWGQGTLVTVSS

SEQ ID NO: 22786 - protein, 107 aa, Homo sapiens
TQTLTLTCTFSGFSLSTSGVGVGWIRQPPGKALEWLALIYWDDDKRYSPSLKSRLTITKDTSKNQVVLRMTNMDPVDTATYYCAHRRSNGWYDFDYWGQGTLVTVSS

SEQ ID NO: 22787 - protein, 107 aa, Homo sapiens
TQTLTLTCTFSGFSLSTTGVGVGWIRQPPGKALEWLALIYWDDDKRYSPSLKSRLTITKDTSKNQVVLTMTNMDPVDTATYYCAHRRSNGWYDFDYWGQGTLVTVSS

SEQ ID NO: 22788 - protein, 95 aa, Homo sapiens
AASGFNFGSYTMSWVRQAPGKGLEWVSAISGGSATINYADSVKGRFTISRDNSKNTLYLQLNGLRAGDTAIYYCAKGGAARPEYWGQGTLVTVSS

SEQ ID NO: 22789 - protein, 95 aa, Homo sapiens
VASGFTFSSYTMSWVRQPPGKGLEWVSAISGGSATIYYADSVKGRFTISRDNSKNTLYLQLNGLRAGDTAIYYCAKGGAARPEYWGQGTLVTVSS

SEQ ID NO: 22790 - protein, 95 aa, Homo sapiens
AASGFNFGSYTMNWVRQAPGKGLEWVSAISGGSATINYADSVKGRFTISRDNSKNTVYLQLNGLRAGDTAMYYCAKGGAARPEYWGQGTLVTVSS

SEQ ID NO: 22791 - protein, 95 aa, Homo sapiens
AASGFTFGSYTMSWVRQAPGKGLEWVSAISGGSATINYADSVKGRFTISRDNSKNTLYLQLNGLRAGDTAIYYCAKGGAARPEYWGQGTLVTVSS

SEQ ID NO: 22792 - protein, 95 aa, Homo sapiens
AASGFTFSSYHMSWVRQAPGKGLEWVSALSGSGVSTYYADSVQGRFTVSRDNSKDTLYLQMNSLRAEDTAIYYCAKGGAARPEYWGQGTLVTVSS

SEQ ID NO: 22793 - protein, 95 aa, Homo sapiens
AASGLTMSDKWMNWVRQVPGKGLEWVARIKGKSEGATIDYAAPVKGRFTISRDDSSNILFLQMNSLKIEDTALYYCATGTTTGAWGQGTLVTVSS

SEQ ID NO: 22794 - protein, 95 aa, Homo sapiens
AGSGFSLSNEWMNWVRQAPGKGLEWVARIKRKSEGGTIDYGALVKGRFTISRDDSNNMLYLQMISLKTDDTAVYYCATGTTTGAWGQGTLVTVSS

SEQ ID NO: 22795 - protein, 95 aa, Homo sapiens
AGSGFDVSNDWMNWVRQAPGKGLEWVGRIKRKTEGATIDYGAPVKGRFTVSRDDEKNTVYLQMNSLKSEDTAVYYCATGTTTGAWGQGTLVTVSS

SEQ ID NO: 22796 - protein, 96 aa, Homo sapiens
EVSGISLTNVWMSWVRQAPGQGLEWVGRVRTKSDGGTSDYAAPVKGRVTITRDDASNTVYLHMNSLNTEDTALYFCATHHSSGLDYWGPGTPVTVS

SEQ ID NO: 22797 - protein, 97 aa, Homo sapiens
AASGITVRNTWMSWVRQGPGKGLEWVGRLRSDTDGGTADFAAPVKGRFTISRDDSKNTLYLQLNSLKTEDTAVYYCATHHSSGLDYWGQGSLVTVSS

SEQ ID NO: 22798 - protein, 93 aa, Homo sapiens
AASGFTFSSVWMSWVRQAPGKGLEWVANIKQDGSDKYYVDSVKGRFTISRDNRKNSLHLQMNSLRAEDTAMYYCARGRGFDVWGQGTTVTVSS

SEQ ID NO: 22799 - protein, 93 aa, Homo sapiens
AASGFIFNNLWMNWVRQAPGKGLEWVANIKPDGTDKYYVDSVKGRFTISRDNAKNSLYLQMNSLRAEDTAVYYCARGRGFDVWGQGTTVTVSS

SEQ ID NO: 22800 - protein, 97 aa, Homo sapiens
AASGFTFSIYAMHWVRQAPGKGLEWVAFISYDGNNKYYADSVKGRFTISRDNSKNTLYLQVNSLRAEDTALYYCARDWYTSSCLDYWGQGTLVTVSS

SEQ ID NO: 22801 - protein, 97 aa, Homo sapiens
AASGFTFSIYGMHWVRQAPGKGLEWVAVIWYDGSNTYYADSVKGRFTISRDNSKNTLYLQMSSLRAEDTAVYYCARDWYTSSCLDYWGQGTLVTVSS

SEQ ID NO: 22802 - protein, 96 aa, Homo sapiens
AASGFTFSRYWMHWVRQAPGEGLVSVSRINEDGSVGSYADSVKGRFTISRDNTKNVLHLQMNSLRAEDTAVYYCARGSSSPGIDYWGQGTLVSVSS

SEQ ID NO: 22803 - protein, 96 aa, Homo sapiens
AVSGFTFSSYWMHWVRQAPGEGLVSVSRINEDGSVVSYADSVKGRFTISRDNTKNVLHLQMNSLRAEDTAMYYCARGSSSPGIDYWGQGTLVPVSS

SEQ ID NO: 22804 - protein, 96 aa, Homo sapiens
AASGFTFGNYWMHWVRQGPEKGLVWVSRINNDGSGTDYADSVKGRFTISRDTAKNRLYLQMNSLRVEDTGIYYCARGSSSPGIDYWGRGTLVTVSS

SEQ ID NO: 22805 - protein, 96 aa, Homo sapiens
VASGFTFSNYWMHWVRLDPGKGLAWVSGFNSDGSFTDYADSVKGRFTISRDNAKNKLYLQMNSLRAEDTAVYYCARGSSSPGIDYWGRGTLVTVSS

SEQ ID NO: 22806 - protein, 96 aa, Homo sapiens
AASGFTFSSYWMHWVRQGPEKGLVWVSRMTSDGRGTDYADSVKGRFTISRDTAKNTLYLQMNRLRAEDTGIYYCARGSSSPGIDYWGRGTLVTVSS

SEQ ID NO: 22807 - protein, 94 aa, Homo sapiens
EASGFTFSSYWMSWVRQAPGKGLEWVANIKQDGSEKYYVDSVKGRFTISRDNAKNSLHLQMNSLRAEDTAVYYCARKGGVADYWGQGSLVTVSS

SEQ ID NO: 22808 - protein, 94 aa, Homo sapiens
VASGFSLSSYWMSWVRQAPGKGLEWVANIEPDGSKRNYVDSVKGRFTISRDNAKNSLFLQMNSLRVEDTAVYYCARKGGVADYWGQGTLVTVSS

SEQ ID NO: 22809 - protein, 97 aa, Homo sapiens
ASGFIFSSYWMSWVRQAPGKGLEWVANIKQDGSDKYYVNSVKGRFTISRDNAKSSLYLQLNSLTAEDTAVYYCGRSAVAGTDGVDYWGRGTLVTVSS

SEQ ID NO: 22810 - protein, 98 aa, Homo sapiens
EASGFTFSSYWMSWVRQAPGKGLEWVANIKQDGSEKYYVDSVKGRFTISRDNPKNSLYLQMNSLRAEDTAVYYCGRSAVAGTDGVDYWGQGTLVTVSS

SEQ ID NO: 22811 - protein, 93 aa, Homo sapiens
AASGFTFSKAWMSWVRQAPGKGLEWVGRIKSKSDGGTIDYAAPVKGRFTISRDDSKKTLSLQMNSLKTEDTAVYYCTSGMKYWGQGTLVTVSS

SEQ ID NO: 22812 - protein, 93 aa, Homo sapiens
AASGFTFSKAWMSWVRQAPGKGLEWVGRIKSKTDGGTIDYAAPVKGRFTISRDDSKKTLYLQMNSLKAEDTAVYYCTSGMKYWGQGTLVTVSS

SEQ ID NO: 22813 - protein, 93 aa, Homo sapiens
AGSGFTFTKAWMSWVRQAPGKGLEWVGRIKSRSDGGTTDYAAPVTARFTVSRDDSKNTLYLQMNSLRTGDTGIYYCTSGMKYWGRGTLVTVSS

SEQ ID NO: 22814 - protein, 93 aa, Homo sapiens
VGSGFTFTKAWMSWVRQAPGKGLEWIGRIKSRNDGGTTDYAASVKGSFTISRDDSKNTLFLQMNRLKTEDTAVYYCTSGMKYWGRGTLVTVSS

SEQ ID NO: 22815 - protein, 93 aa, Homo sapiens
AGSGFTFTKAWMSWVRQAPGKGLEWIGRIKSRTDGGTTDYAASVKGSFTISRDDSKNTLFLQMNRLKTEDTAVYYCTSGMKYWGRGTLVTVSS

SEQ ID NO: 22816 - protein, 93 aa, Homo sapiens
AGSGFTFTKAWMSWVRQAPGKGLEWIGRIKSRTDGGTTDYAAPVKGSFTISRDDSKNTLFLQMNRLKTEDTAVYYCTSGMKYWGRGTLVTVSS

SEQ ID NO: 22817 - protein, 93 aa, Homo sapiens; identical to SEQ ID NO: 22816

SEQ ID NO: 22818 - protein, 98 aa, Homo sapiens
ASGYTFTTYAMQWVRQAPGQRLEWMGWINCGNGNTNYAQKFKGRVAITRDTSASTAYMEVSSLRSEDTAVYYCAREHDTLTGYAFDIWGRGTMVTVSS

SEQ ID NO: 22819 - protein, 98 aa, Homo sapiens
ASGYIFTSFAIHWVRQAPGQRLEWMGWINAGNANTKYSQKFQGRVTITRDTSATTAYMELSSLRSEDTAVYYCAREHDTLTGYAFDIWGQGTMVTVSS

SEQ ID NO: 22820 - protein, 98 aa, Homo sapiens
ASGYIFTSFAIHWVRQAPGQRLEWMGWINAGNGNTKYSQKFQGRFTITKDTSATTAYMELSSLNSEDTAVYYCAREHDTLTGYAFDIWGQGTMVTVSS

SEQ ID NO: 22821 - protein, 95 aa, Homo sapiens
AASGFTFNYYGMHWVRQAPGKGLEWVAVISYDGRNKYYADSVKGRLTISRDNSKNTLYLQMNSLRAEDTAVYYCAKREEYYFDYWGQGTLVTVSS

SEQ ID NO: 22822 - protein, 95 aa, Homo sapiens
AASGFTFSSYGMHWVRQAPGKGLEWVAIISYDGSNKYYADSMKGRFTISRDNSKNTLYLQMNSLRAEDTAVYYCAKREEYYFDYWGQGTLVTVSS

SEQ ID NO: 22823 - protein, 96 aa, Homo sapiens
AASGFTFSDYYMSWIRQAPGKGLEWVSYISNGNVYTRYADSVKGRFTMSRDNAKSALYLQMNSLRADDTAIYYCARVPGTYRLDYWGQGTLVTVSS

SEQ ID NO: 22824 - protein, 95 aa, Homo sapiens
VSGFSFRDYYMSWIRQAPGKGLEWVSYISNSAGTTYYADSVRGRFTISRDNAKNSLYLQMNSLGAEDTAVYYCARVPGTYRLDYWGPGTLVTVSS

SEQ ID NO: 22825 - protein, 96 aa, Homo sapiens
AVSGFSFRDYYMSWIRQAPGKGLEWVSYISNSAGTTYYADSVRGRFTISRDNAKNSLYLQMNSLGAEDTAVYYCARVPGTYRLDYWGQGTLVTVSS

SEQ ID NO: 22826 - protein, 95 aa, Homo sapiens
VSGFSFRDYYMSWIRQAPGKGLEWVSYISNSAGTTYYTDSVRGRFTISRDNAKNSLYLQMNSLGAEDTAVYYCARVPGTYRLDYWGPGTLVTVSS

SEQ ID NO: 22827 - protein, 93 aa, Homo sapiens
ASGFTFSDFWIHWVRQSPGKGPVWVSRINKDGSITSYTDSVRGRFTTSRDNAKNTLYLQMNSLRAEDTAVYYCVRDFTAWSDFWGRGTLVTVS

SEQ ID NO: 22828 - protein, 94 aa, Homo sapiens
AASGFTLSTYWMHWVRQAPGKGLVWVSRVNKDGTYSSHADSVKGRFTISRDNAENTLYLQMNSLRAEDTAVYYCVRDFTAWSDFWGRGTQVTVS

SEQ ID NO: 22829 - protein, 95 aa, Homo sapiens
AASGFTFSDYWMTWVRQAPGKGLEWVAKIRGDGSEMYYVDSVKGRFTISRDNAKNSLYLQMSSLRAEDTAVYYCARGGRTRFDCWGQGTLVTVAS

SEQ ID NO: 22830 - protein, 95 aa, Homo sapiens
AASGFGFGGYWMSWVRQAPGKGLEWVAKIKDDGSEKYHVDSVKGRFTISRDNAKNSLYLQMNSLRAEDTAVYYCARGGRTRFDCWGQGTLVTVSS

SEQ ID NO: 22831 - protein, 95 aa, Homo sapiens
AASGFTFTSYWMTWVRQAPGKGLEWVGSIKSDGSEHFYVDSVKGRFTISRDDAKNSLYLQMNSLSAEDTAIYYCARGGRTRFDCWGQGTLVTVSS

SEQ ID NO: 22832 - protein, 96 aa, Homo sapiens
VSGTSVKSQYWSWIRQPPGKGLEWVAYGIHTGITKYNPSLESRLTLSVDTSKNQLSLRLTSVTAADTAVYYCARHRLYDTDGFDIWGQGTKVTVSS

SEQ ID NO: 22833 - protein, 96 aa, Homo sapiens
TVSGDSMSGYYSWIRQSPGKGLEWIAHISHSGITDYNPSLKSRITISVDKSKSQLSLNLNSVTAADTAVYYCARHRLYDTDGFDIWGQGAMVTVSS

SEQ ID NO: 22834 - protein, 97 aa, Homo sapiens
AVYGGPLRGYYWSWIRQSPGKGLEWIGEISRSGSFTQNPSLKSRVTVSIDTSKNQFSLKLTSVTAADTALYYCARGPTGSGWSFDYWGPGTLVTVSS

SEQ ID NO: 22835 - protein, 97 aa, Homo sapiens
AVYGGSLSGYHWSWIRQPPGKGLEWIGEINRSGSFTYNPSLKSRVTVSTDTSKNQFSLKLTSVTAADTALYYCARGPTGSGWSFDYWGQGTLVTVSS

SEQ ID NO: 22836 - protein, 97 aa, Homo sapiens; identical to SEQ ID NO: 22835

SEQ ID NO: 22837 - protein, 97 aa, Homo sapiens
VVSGFYLENYAMSWVRQAPGKGLEWVSDISGTGARKSYADSVKGRFTISRDNSKNTMFLEMNSLRVEDTALYYCARDGYNWIPYDMWGQGTMVTVSS

SEQ ID NO: 22838 - protein, 95 aa, Homo sapiens
SGFQLQNYAMSWVRQAPGKGLEWVSDISGTGARKSYADSVKGRFTISRDNSANTLFLEMNSLRVEDTALYYCARDGYNWIPYDMWGQGTMVTVSS

SEQ ID NO: 22839 - protein, 97 aa, Homo sapiens
VASGFALSSAAMGWVRQAPGKGLEWVSSISGTGGNTYYADSVKGRFTISRDNSKNTLYLELGSLRAEDTALYYCARDGYNWIPYDMWGHGTMVAVSS

SEQ ID NO: 22840 - protein, 96 aa, Homo sapiens
AASGFTFSSFSMHWVRQAPGKGLEYVSALNNNGDITYYGDSVKGRFTISRDNSKNTLYLQMGSLRADDMAVYYCARIGGSGAYDIWGQGTMVTVSS

SEQ ID NO: 22841 - protein, 96 aa, Homo sapiens
AASGFTFSNFSMHWVRQAPGKGLEYVSAISYNVGNTYYADSVKGRFTISRDNSKNTLHLQMGSLRGDDMAVYYCARIGGSGAYDIWGQGTMVTVSS

SEQ ID NO: 22842 - protein, 96 aa, Homo sapiens
VASGFTFSTFSMHWVRQAPGKGLEYVSAIGRNGGDTYYANSVEGRFTISRDNSKYTLYLQMGSLRAEDMAVYFCARIGGSGAYDIWGQGTMVTVSS

SEQ ID NO: 22843 - protein, 96 aa, Homo sapiens
VASGFTFSTFSMHWVRQAPGKGLEYVSAIDRNGGDTYYANSVEGRFTISRDNSKYTLYLQMGSLRAEDMAVYFCARIGGSGAYDIWGQGTMVTVSS

SEQ ID NO: 22844 - protein, 95 aa, Homo sapiens
AASGFTMSNDWMNWVRQVPGKGLEWVARIKRKSEGATIDYAAPVKGRFTISRDDSKNTLFLQMNSLKIEDTAVYYCATGTTVGAWGQGTLVTVSS

SEQ ID NO: 22845 - protein, 95 aa, Homo sapiens
AASGFSVSNEWMNWVRQTPGKGLEWLGRIKRKSEGGAIDYAAHVEGRFTVSRDDSKNTFYLQMSSLKIEDTGVYSCATGTTVGAWGQGTLVSVSS

SEQ ID NO: 22846 - protein, 94 aa, Homo sapiens
AASGFSVSDEWMNWVRQTPGKRLEWLGRIKRDREGGTIDYAAHVEGRFTVSRDDSKNTFYLQMTSLKTEDTGLYSCATGTTVGAWGQGTQVTVS

SEQ ID NO: 22847 - protein, 95 aa, Homo sapiens
AASGFSVNDEWMNWVRQTPGKGLEWLGRIKRESEGATIDYAAHVEGRFTVSRDDSRNTFYLQMRRLKIEDTGVYSCATGTTVGAWGQGTPVTVSS

SEQ ID NO: 22848 - protein, 94 aa, Homo sapiens
ATSGFTFSQDWMTWVRQAPGKRLEWVANIKADGSEKTYADSVKGRFTISRDNAKNSLYLQMNGLRAEDTAVYSCARGNGWLPHWGQGTVVTVSS

SEQ ID NO: 22849 - protein, 94 aa, Homo sapiens
VVSGVSFTKDWMSWVRQAPGKGLEWVANINQDGSEKNYVDSVKGRFTISRDNAKNSLYLQVNSLTAEDTAVYYCARGNGWLPHLGQGTLVTVSS

SEQ ID NO: 22850 - protein, 94 aa, Homo sapiens
VVSGVSFSEDWMSWVRQAPGKGLEWVANINQDGSEKYYVDSVKGRFTISRDNAKNSVFLQLNSLTAEDTAVYYCARGNGWLPHCGQGTLVTVSS

SEQ ID NO: 22851 - protein, 94 aa, Homo sapiens
VVSGVNFRNDWMSWVRQAAGKGPEWVANINQDGSEKYYVDSVKGRFTISRDNAKNSLYLQVNSLTVEDTAVYYCARGNGWLPHWGQGTLVTVSS

SEQ ID NO: 22852 - protein, 95 aa, Homo sapiens
AGSGFTFRTSAMHWVRQAPGKGLEWVTEMSSDGSDKHYADSVKGRFTISRDNSKNTLYLQMDSLRTEDTAVYYCVKDAYGSLDYWGQGTLVTVSS

SEQ ID NO: 22853 - protein, 95 aa, Homo sapiens
AASGFMFTIYPMHWLRQAPGKGQEWVAVMSSDGSDIHYTDSVKDRFTISRDNSKNTLYLQMNSLRPEDTAVYYCVKDAYGSLDYWGQGTLVAVSS

SEQ ID NO: 22854 - protein, 95 aa, Homo sapiens
AVSGFTVNSDYMSWVRQAPGKGLEWVSVIYNDRNGGRTYYADSVKGRLTISRDTFKNTVYLQMNSLRAEDTAVYYCVRHDWFDPWGQGTLVTVSS

SEQ ID NO: 22855 - protein, 93 aa, Homo sapiens
VVSGFIVNSDYMSWVRQRPGEGLEWISTIYSGYGRTSYAESVKGRFSIARDNSKNTVYLQMNSLRAEDTAVYYCVRHDWFDPWGLGTLVIVSS

SEQ ID NO: 22856 - protein, 93 aa, Homo sapiens
AASGFTFSSSEMNWFRQAPGKGPEWVAYITSSGSVINYADSVKGRFTVSRDSAKNSLYLHMNSLRVEDTAVYYCARGNPVPDWGQGTLVTVSS

SEQ ID NO: 22857 - protein, 93 aa, Homo sapiens
AASGFTFSSSEMNWFRQAPGKGPEWVAYITSSGSVINYADSVKGRFTVSRDSAKNSLYLHMNSLKVEDTAVYYCARGNPVPDWGQGTLVTVSS

SEQ ID NO: 22858 - protein, 93 aa, Homo sapiens; identical to SEQ ID NO: 22856

SEQ ID NO: 22859 - protein, 91 aa, Homo sapiens
SGFTFSRTEMNWFRQAPGKGPEWLAYIDSTRTNINYADSVKGRFTISRDDAKNSVFLQMNSLRAEDTAVYYCARGNPVPDWGQGTLVTVSS

SEQ ID NO: 22860 - protein, 91 aa, Homo sapiens
SGFIFSKTEMNWFRQAPGKGPEWLAYISSTRTNINYADSVKGRFFISRDDAKNSLFLQMNSLRAEDTAFYYCARGNPVPDWGRGTLVTVSS

SEQ ID NO: 22861 - protein, 93 aa, Homo sapiens
ATSGFTFSDTEMNWVRQAPGQGLQWLSYISSSGDNINYADSVKGRFTVSRDNGKNSLYLQINSLRAEDTAVYYCARGNPVPDWGQGTLVIVSS

SEQ ID NO: 22862 - protein, 94 aa, Homo sapiens
SVSGGSLTGYYWSWIRQPPGKGLEWLGYIHYNGSTLYNASLKSRLTISVDTSKSQFSLTLRSVTAGDTAVYYCARHPGASFDFWGRGTLVTVSS

SEQ ID NO: 22863 - protein, 94 aa, Homo sapiens
SVSGDPMTGYYYSWIRQSPGKGLEWIGYIYYTGSTYYSPSLKSRVTMSIDTSKNHFSLKLSSVTAADTAVYYCARHPGASFDFWGQGTVVTVSS

SEQ ID NO: 22864 - protein, 94 aa, Homo sapiens
SVSGDPMTGYYYSWIRQSPGKRLEWIGYIYYTGSTYYSPSLESRVTMSIDTSKNHFSLKLSSVTAADTAVYYCARHPGASFDFWGQGTVVTVSS

SEQ ID NO: 22865 - protein, 93 aa, Homo sapiens
EASGFTFSTSVMTWVRQAPGKGLEWVSTISGSGASTYYADSVKGRFTISRDNSKNTLYLQMSSLRAEDTAAYYCARRTFFDYWGQGTLVTVSS

SEQ ID NO: 22866 - protein, 93 aa, Homo sapiens
EASGFTFSTSVMTWVRQAPGKGLEWVSTISGSGASTYYADSVKGQFTISRDNSKNTLYLQMSSLRAEDTAAYYCARRTFFDYWGQGTLVTVSS

SEQ ID NO: 22867 - protein, 93 aa, Homo sapiens
AASGFTFSTYGMNWVRQAPGKGLEWVSFIIGSGGSTYDADSVKGRFTISRDNSKNTLYLQMNSLRAEDTAVYYCARRTFFDYWGQGTVVTVSS

SEQ ID NO: 22868 - protein, 93 aa, Homo sapiens; identical to SEQ ID NO: 22865

SEQ ID NO: 22869 - protein, 96 aa, Homo sapiens
AASGFSFSTYWMSWVRQTPEKGLEWVANINEDGSNGYRVDSVKGRFTVSRDNAKNLVYLQMSSLRVEDTALYYCAREDGYNTCDYWGQGTLVTVSS

SEQ ID NO: 22870 - protein, 96 aa, Homo sapiens
VASGFSFRSYWMSWVRQAPGKGPEWVANINQDESDKYFVDSVKGRFSISRDNAKNSLYLQMNSLRAEDTAVYYCAREDGYNTCDYWGQGTLVTVSS

SEQ ID NO: 22871 - protein, 91 aa, Homo sapiens
AASGFSLDDYAMHWVRQAPGKGLEWVAGISRDSRRIGYADSVNGRFTVSRDDARNSLFLQMNSLKIDDTALYYCTKSSVDWGQGTLVTVSS

SEQ ID NO: 22872 - protein, 91 aa, Homo sapiens
EVSGFSLEEFAMHWVRQAPGKGLEWVAGISKDSSRIGYADSVNGRFTVSRDIARNSVFLQMNSLRPEDTATYYCTKSSVDWGQGIMVTVSS

SEQ ID NO: 22873 - protein, 91 aa, Homo sapiens
AASGFTFDDFAMHWVRQRPGQGLEWVAGIKKDSGTKGYADSVKGRFTISRDNARNFVSLQMDSLRLEDTALYYCTKSSVDWGQGTLVTVSS

SEQ ID NO: 22874 - protein, 91 aa, Homo sapiens
AASGFSLDDYAMHWVRQAPGKGLEWVAGISRDSRRIGYADSVNGRFTVSRDDARNPLFLQMNSLKIDDTALYYCTKSSVDWGQGTLVTVSS

SEQ ID NO: 22875 - protein, 91 aa, Homo sapiens
AASGFTFSDYAMHWVRQAPGKGLEWVSGISRTSDRIGYADSVRGRFTISRDNARNSLYLEMNYLKPEDTAFYYCTKSSVDWGRGTLVSVSS

SEQ ID NO: 22876 - protein, 97 aa, Homo sapiens
VASGFIFSRYEMNWVRQAPGKGLEWISYISGSGSTTDRADSVKGRFTISRDNAKNSLYLQMNSLRAEDTAVYYCARDGGRGWALDYWGQGTLVTVSS

SEQ ID NO: 22877 - protein, 97 aa, Homo sapiens; identical to SEQ ID NO: 22876

SEQ ID NO: 22878 - protein, 97 aa, Homo sapiens
AASGIPLRNYEMNWVRQAPGKGLEWISYVDSSGNTKDYADSVKGRFTISRDNAKNSLFLQMNSLRVDDTAVYYCARDGGRGWALDYWGQGILVTVSS

SEQ ID NO: 22879 - protein, 97 aa, Homo sapiens; identical to SEQ ID NO: 22878

SEQ ID NO: 22880 - protein, 97 aa, Homo sapiens
AASGFIFNNYEMNWVRQAPGKGLEWISYIYSDGNTKDYADSVKGRFTISRDNAKNSLYLQMNNLRVDDTAVYYCARDGGRGWALDYWGQGTLVTVSS

SEQ ID NO: 22881 - protein, 97 aa, Homo sapiens
AASGIPLSNYEMNWVRQAPGKGLEWISYINPSGSTEDYADSVKGRFTISRDNAKNSLFLQMNSLRVDDTAVYYCARDGGRGWALDYWSQGILVTVSS

SEQ ID NO: 22882 - protein, 97 aa, Homo sapiens; identical to SEQ ID NO: 22878

SEQ ID NO: 22883 - protein, 97 aa, Homo sapiens
AASGIPLRNYEMNWVRQAPGKGLEWISYVDPSGNTKDYADSVKGRFTISRDNAKNSLFLQMNSLRVDDTAVYYCARDGGRGWALDYWGQGILVTVSS

SEQ ID NO: 22884 - protein, 97 aa, Homo sapiens
AASGIPLRNYEMNWVRQAPGKGLEWISYVDSSGNTKDYTDSVKGRFTISRDNAKNSLFLQMNSLRVDDTAVYYCARDGGRGWALDYWGQGILVTVSS

SEQ ID NO: 22885 - protein, 97 aa, Homo sapiens
AASGIPLRNYEMNWVRQAPGKGLEWISYVDSSGNTKDYADSVKGRFTISRDNAKNSLFLQMNNLRVDDTAVYYCARDGGRGWALDYWGQGILVTVSS

SEQ ID NO: 22886 - protein, 97 aa, Homo sapiens
VASGFIFSRYEMNWVRQAPGKGLEWISYISGSGSTTDRADSVKGRFTISRDNAKNSLYLQMNSLKAEDTAVYYCARDGGRGWALDYWGQGTLVTVSS

SEQ ID NO: 22887 - protein, 99 aa, Homo sapiens
TVSGDSISSYTTYYWGWVRQSPGKGLEWIGAIFYSGTTHYNPSLKTRVTISLDTSKDQFSLKLISVTAADTAIYYCARSRGYSYAHDPWGQGTLVTVSS

SEQ ID NO: 22888 - protein, 99 aa, Homo sapiens
TVSGDSISSYTTYYWGWVRQSPGKGLEWIGAIFYSGTTHYNPSLKTRVTISLDTSKDQFSLKLISVTAADTAVYYCARSRGYSYAHDPWGQGTLVTVSS

SEQ ID NO: 22889 - protein, 99 aa, Homo sapiens; identical to SEQ ID NO: 22888

SEQ ID NO: 22890 - protein, 99 aa, Homo sapiens
TVSGDSISSYTTYYWGWVRQSPGKGLEWIGAIFYSGTTHYNPSLKRRVTISLDTSKDQFSLKLISVTAADTAVYYCARSRGYSYAHDPWGQGTLVTVSS

SEQ ID NO: 22891 - protein, 99 aa, Homo sapiens
TVSGDSMSSSSDYYWGWVRQAPGKGLEWIGGMFLSGPTHYDPSLKSRVTISVDTSTNQFFLKLNYVTAADTAVYYCARSRGYSYAHDPWGPGTLVIVSS

SEQ ID NO: 22892 - protein, 97 aa, Homo sapiens
ASGFTFGRYSMNWVRQAPGKGLEWVSAISSSRSYIYYVDSVKGRFTISRDDAKSSVYLQMNSLRAEDTAVYYCARAGPYGSGSFDYWGRGTLVTVSS

SEQ ID NO: 22893 - protein, 97 aa, Homo sapiens
ASGFTFGRFSMNWVRQAPGKGLEWVSAISSGSGYIYYLDSVKGRFTISRDDAKSSIYLQMNSLRAEDTAVYYCARAGPYGSGSFDYWGRGTLVTVSS

SEQ ID NO: 22894 - protein, 97 aa, Homo sapiens
AASGFTFRSYSLNWVRQAPGKGLEWVSAISSESKYIYYADSVEGRFTIFRDDAKNSVYLQMNTLGADDTAVYYCARAGPYGSGSFDYWGQGTLVIVS

SEQ ID NO: 22895 - protein, 97 aa, Homo sapiens
ASGFTFGRYSMNWVRQAPGKGLEWVSASSSSRSYIYYVDSVKGRFTISRDDAKSSVYLQMNSLRAEDTAVYYCARAGPYGSGSFDYWGRGTLVTVSS

SEQ ID NO: 22896 - protein, 97 aa, Homo sapiens; identical to SEQ ID NO: 22893

SEQ ID NO: 22897 - protein, 97 aa, Homo sapiens
APSGFIFSNYAMHWVRQAPGKGLEWVAVIWYDGSNKLHADSVKGRFTISRDNSENTLSLQMNNLRADDSAVYYCARGGTTGGYGMDVWGQGTSVTVS

SEQ ID NO: 22898 - protein, 98 aa, Homo sapiens
AASGFTFGNHGMHWVRQAPGKGLEWVAVIWYDGSNSHYADSVKGRFTISRDNSENMVYLKMTNLRAEDTALYYCARGGTTGGYGMDVWGQGTTVTVSS

SEQ ID NO: 22899 - protein, 97 aa, Homo sapiens
APSGFIFSNYAMHWVRQAPGKGLEWVAVIWYDGRNKLYADSVKGRFTISRDNSENTLSLQMNNLRAEDSAIYYCARGGTTGGYGMDVWGQGTSVTVS

SEQ ID NO: 22900 - protein, 91 aa, Homo sapiens
GSGFTFGDYAMTWVRQAPGKGLEWVGFIRTKGNGGTTDYAASVKGRFTISRDDSKSIAYLQMNSLKIEDTAVYYCARRGYWGRGTLVTVSS

SEQ ID NO: 22901 - protein, 92 aa, Homo sapiens
TASGFTFSDYAMTWVRQAPGKGLEWVGFIRNKTYGGTTDYAASVKGRFTISRDDSKSIAYLQMNSLKAEDTAVYYCARRGYWGQGTLVTVSS

SEQ ID NO: 22902 - protein, 92 aa, Homo sapiens
TGSGFTFGDYAMTWVRQAPGKGLEWVGFIRNKTYGGTTDYAASVKGRFTISRDDSKSIAYLQMNSLKTEDTAVYYCARRGYWGQGTLVTVSS

SEQ ID NO: 22903 - protein, 92 aa, Homo sapiens
TASGFTFSDYAMTWVRQAPGKGLEWVGFIRNKTYGGTTDYAASVKGRFTISRDDSKSIAYLQMNSLKVEDTAVYYCARRGYWGQGTLVTVSS

SEQ ID NO: 22904 - protein, 93 aa, Homo sapiens
VSGGSISGYYWSWVRQPPGKGLEYIGYMYYSGSTNYNPSLKSRVTISVDTSKNQFSLRLSSVTAADTAIYYCARLRGSYLDYWGQGTLVTVSS

SEQ ID NO: 22905 - protein, 93 aa, Homo sapiens
VSGGSISGYYWSWVRQPPGKGLEYIGYMYYSGSTNYNPSLQSRVTISVDTSKNQFSLRLSSVTAADTAVYYCARLRGSYLDYWGQGTLVTVSS

SEQ ID NO: 22906 - protein, 93 aa, Homo sapiens
VSGGSISGYYWSWIRQPPGKGLEYIGYMYYSGSTNYNPSLKSRVTISVDTSKNQFSLRLSSVTAADTAVYYCARLRGSYLDYWGQGTLVTVSS

SEQ ID NO: 22907 - protein, 93 aa, Homo sapiens
VSGGSISGYYWSWVRQPPGKGLEYIGYMYYSGSTNYNPSLKSRVTISVDTSKNQFSLRLSSVTAADTAVYYCARLRGSYLDYWGQGTLVTVSS

SEQ ID NO: 22908 - protein, 94 aa, Homo sapiens
TVSGGSISGYYWSWIRQPPGKGLEYIGYMYYSGETNYNPSLKSRVTISVDTSKNQFSLRLSSVTAADTAVYYCARLRGSYLDYWGQGTLVTVSS

SEQ ID NO: 22909 - protein, 93 aa, Homo sapiens; identical to SEQ ID NO: 22906

SEQ ID NO: 22910 - protein, 93 aa, Homo sapiens
VSGGSISGYYWSWVRQPPGKGLEYIGYMYYSGSTNYNPSLKSRATISVDTSKNQFSLRLSSVTAADTAIYYCARLRGSYLDYWGQGTLVTVSS

SEQ ID NO: 22911 - protein, 93 aa, Homo sapiens; identical to SEQ ID NO: 22907

SEQ ID NO: 22912 - protein, 93 aa, Homo sapiens; identical to SEQ ID NO: 22906

SEQ ID NO: 22913 - protein, 94 aa, Homo sapiens
TVSGGSISDYYWNWIRQPPGKGLEWIGYIYYSGSTNYNPSLKSRVTMSVDTSKNQFSLNLSSVTAADTAVYYCARLRGSYLDYWGQGTLVTVSS

SEQ ID NO: 22914 - protein, 92 aa, Homo sapiens
AASGFTFSRSWMHWVRQAPGKGLVWVSRLNADATLTNYADSVKGRFTISRDNAKNTLSLQMNGLRAEDTAVYYCVRGLGEMWGQGTMVTVSS

SEQ ID NO: 22915 - protein, 92 aa, Homo sapiens
GASGFTFRSFWIHWVRQAPGKGPVWVSRMNSDGTMTGFADSVKGRFIIARDIAKNTVNLQMNRLTVEDTGVYYCVRGLGEMWGRGTKVIVSS

SEQ ID NO: 22916 - protein, 92 aa, Homo sapiens; identical to SEQ ID NO: 22915

SEQ ID NO: 22917 - protein, 97 aa, Homo sapiens
AASGFTFSSYWMHWVRQAPGKGLVWVSRINGNGGSTNYADSVKGRFTTSRDNAKNTLYLQINSLTAEDTAVYYCARGNDGYGNFDYWGQGTLVTVSS

SEQ ID NO: 22918 - protein, 97 aa, Homo sapiens
AASGFTFSSYWMHWVRQAPGKGLVWVSRINGNGGTTSYADSVKGRFTISRDNAKNTLYLHMNSLTAEDNGVYYCARGNDGYGNFDYWGQGTLVTVSS

SEQ ID NO: 22919 - protein, 97 aa, Homo sapiens
AASGFTFSSYWMHWVRQAPGKGLVWVSRIHGNGGTTNYADSVKGRFTISRDNAKNTLFVQMNSLTAEDTGVYYCARGNDGYGNFDYWGQGTLVTVSS

SEQ ID NO: 22920 - protein, 97 aa, Homo sapiens
AASAFTFSSYWMHWVRQVPGKGLVWVSRISPDGSSTNYADSVTGRFTISRDSAKSTLYLQMNSLRAEDTAVYYCARGNDGYGNFDYWGQGVLVTVSS

SEQ ID NO: 22921 - protein, 97 aa, Homo sapiens
EASGFTFSSYWMHWVRQPPGKGLVWVSRISSNGGTTNYAESVKGRFTISRDNAKNTLYVQIDSLTAEDTAVYYCARGNDGYGNFDYWGQGTLVTVSS

SEQ ID NO: 22922 - protein, 97 aa, Homo sapiens
AASGFTFSSYWMHWVRQAPGKGLVWVSRIHGNGGTTNYADSVKGRFTISRDNAKNTLFLQMNSLTAEDTGVYYCARGNDGYGNFDYWGQGTLVTVSS

SEQ ID NO: 22923 - protein, 97 aa, Homo sapiens
AASGFTFSSYSMNWVRQAPGKGLEWVSRIHGNGGTTNYADSVKGRFTISRDNAKNTLFLQMNSLTAEDTGVYYCARGNDGYGNFDYWGQGTLVTVSS

SEQ ID NO: 22924 - protein, 96 aa, Homo sapiens
AASGFTFSSFGMHWVRQAPGKGLEWVAVIWYDESNKYYADSVKGRFTISRDTSKNTLYLQMNSLRAEDTAVYYCAKDSSSWSIDYWGQGTLVTVSS

SEQ ID NO: 22925 - protein, 96 aa, Homo sapiens
AASGFIFSSYGMHWVRQAPGKGLEWVAVIWYDGSNQYYADSVKGRFTISRDISKNTLYLQMNSLRAEDTAVYYCAKDSSSWSIDYWGQGTLVTVSS

SEQ ID NO: 22926 - protein, 93 aa, Homo sapiens
AASGSSVSKFWMNWIRQAPGKGLEWVANIKDDGSEKNYIDSVKGRFTISRDNAKNSLYLQLNSLRVEDTAVYYCARGHYDNYWGQGTLVTVSS

SEQ ID NO: 22927 - protein, 93 aa, Homo sapiens
AVSGLTFSNLYMNWVRQAPGKGLEWVANINADGSERNYVDSVKGRFTISRDNAKNSLYLQMNSLSAEDTAVYYCARGHYDNYRGQGTLVTVSS

SEQ ID NO: 22928 - protein, 93 aa, Homo sapiens; identical to SEQ ID NO: 22927

SEQ ID NO: 22929 - protein, 92 aa, Homo sapiens
AASGFTFSYYWMHWVRQAPGKGLVWVSRINNDGNIITYADSVKGRFTISRDYAKNTMYLQMNSLRGEDTAVYYCARGMGDHWGQGTLVTVSS

SEQ ID NO: 22930 - protein, 92 aa, Homo sapiens; identical to SEQ ID NO: 22929

SEQ ID NO: 22931 - protein, 91 aa, Homo sapiens
ASGFTFNRYWMHWVRQAPGKGLVWVARIDSGGLMTTYADSVKGRFTISRDNAKNTLYLQMHSLRVEDTAVYFCARGMGDHWGQGTLVTVSS

SEQ ID NO: 22932 - protein, 98 aa, Homo sapiens
SVSGGSISTYYWNWIRQSPGKGLEWIGHIYNSGSTNYNPSLKSRVTISVDMSKNQFSLKLYSVTAADTAVYYCARDGSGTYFNWFDPWGQGTLVTVSS

SEQ ID NO: 22933 - protein, 98 aa, Homo sapiens; identical to SEQ ID NO: 22932

SEQ ID NO: 22934 - protein, 98 aa, Homo sapiens
TVSGVSISNYYWSWIRQPPGKGLEWIGYIYNSGSTNYNPSLKSRVTISVDTSKNQFSLKLSSVTAADTAVYYCARDGSGTYFNWFDPWGQGTLVTVSS

SEQ ID NO: 22935 - protein, 97 aa, Homo sapiens
VASGFRFSTYGIHWVRQAPGKGLEWVAVVSSDGRIQYYADSVKDRFTISRDNSKNTLYLQMSSLRVDDTAIYYCAKEIGVADLFDYWGQGTLVTVSS

SEQ ID NO: 22936 - protein, 97 aa, Homo sapiens
AASGFTFSSYGIHWVRQAPGKGLEWMAVISYDGSKTYYADSVKDRFTISRDNSRNTLYLQMNTLRAEDTAVYYCAKEIGVADLFDYWGQGTLVTVSS

SEQ ID NO: 22937 - protein, 97 aa, Homo sapiens
AASGFSFSSYGIHWVRQAPGKGLEWVAVISDNGIMQYYADSVTGRFTISRDNSKNTLYLQMNSLTVEDTAIYYCAKEIGVADLFDYWGQGTLVTVSS

SEQ ID NO: 22938 - protein, 97 aa, Homo sapiens
AASGFSFSNYGIHWVRQAPGKGLEWMGVISSDGRITYYADSVKDRFTISRDNSKNTLYLQLNSLRPEDTAVYYCAKEIGVADLFDYWGQGTPVTVSS

SEQ ID NO: 22939 - protein, 97 aa, Homo sapiens
AASGFTFSSFGIHWVRQPPGKGLEWMAVISYDGNIAYYADSVKGRFTISRDNSKNTLYLQLNSLRPEDTAIYYCAKEIGVADLFDYWGQGTLVTVSS

SEQ ID NO: 22940 - protein, 97 aa, Homo sapiens
AASGFTFSSYGIHWVRQAPGKGLEWVGVISSDGNIQYYADSLKDRFTISRDNSKNTLYLQMNSLRVDDTATYYCAKEIGVADLFDYWGQGTLVTVSS

SEQ ID NO: 22941 - protein, 97 aa, Homo sapiens
AASGFTFRSYGIHWVRQAPGKGLEWVAVISYDGSNTYYADSVKGRFTISRDNSKNTLYLQMYSLRAEDTAVYYCAKEIGVADLFDYWGQGTLVTVSS

SEQ ID NO: 22942 - protein, 96 aa, Homo sapiens
ASGFSFSFYGIHWARRAPGRGLEWVGVISSDGNKQYYGDSVKGRFTISRDNSKNTLYLQMNSLRADDTAIYYCAKEIGVADLFDYWGQGTLVTVSS

SEQ ID NO: 22943 - protein, 97 aa, Homo sapiens
VASGFRFSTYGIHWVRQAPGKGLEWVAVVSSDGHIQYYADSMKGRFTISRDNSKNTLYLQMSSLRLDDTAIYYCAKEIGVADLFDYWGQGTLVTVSS

SEQ ID NO: 22944 - protein, 97 aa, Homo sapiens
AASGFTFSSYGIHWVRQAPGKGLEWMGVISSDGHITYYADSVKDRFTISRDNSKNTLYLQMKSLRVEDTAVYYCAKEIGVADLFDYWGQGTLVTVSS

SEQ ID NO: 22945 - protein, 97 aa, Homo sapiens
AASGFAFSDYGIHWARQAPGKGLEWLAVISSDGTKTYYGNSMKDRFTISRDNSKNILYLQMNSLRAEDTAVYYCAKEIGVADLFDYWGQGTPVTVSS

SEQ ID NO: 22946 - protein, 94 aa, Homo sapiens
AASGFFLIDYAMHWVRQAPGKGLVWVSRIRTDETSATYVDSVKGRFTSSRDDARNTLYLQMNSLRAEDTGVYYCVRDVGYAFDIWGQGTIVTVS

SEQ ID NO: 22947 - protein, 94 aa, Homo sapiens; identical to SEQ ID NO: 22946

SEQ ID NO: 22948 - protein, 95 aa, Homo sapiens
AASGFTLSTYSMHWVRQAPGKGLVWVSRSNTYGTTTTYADSVKGRFTISRDNAKNTLYLQMNSLRAEDTAVYYCVRDVGYAFDIWGQGTMVSVSS

SEQ ID NO: 22949 - protein, 97 aa, Homo sapiens
AASGFTFSNAWMSWVRQAPGKGLEWVGRIKSKTDGGTTDYAAPVKGRFTISRDDSKNTLYLQMNSLKTEDTAVYYCTTRTWSLVDYWGQGTLVTVSS

SEQ ID NO: 22950 - protein, 97 aa, Homo sapiens
AVSGFTLSNAWMSWVRKVPGKGLEWVGRIKSKIDGGTTDYAAPVKGRFTISRDDSKNMLFLQMNSLKTEDTAVYYCTTRTWSLVDYWGQGTLVTVSS

SEQ ID NO: 22951 - protein, 93 aa, Homo sapiens
AASGFTFSTYAMSWVRQAPGKGLEWVSSISGSGGSTYYTDSVKGRFTISRDNSKNTLYLQMNSLRAEDTALYSCARTVACEVWGQGTLVTVSS

SEQ ID NO: 22952 - protein, 93 aa, Homo sapiens; identical to SEQ ID NO: 22951

SEQ ID NO: 22953 - protein, 93 aa, Homo sapiens; identical to SEQ ID NO: 22951

SEQ ID NO: 22954 - protein, 93 aa, Homo sapiens
AASGFTFSTYAMTWVRQAPGKGLEWVSSISGSGGSTYYRDSVKGRFTISRDNSKNTLYLQMNSLRAEDTALYSCARTVACEVWGQGTLVIVSS

SEQ ID NO: 22955 - protein, 93 aa, Homo sapiens
AASGFTFSTYAMTWVRQAPGKGLEWVSSISGSGGSTYYTDSVKGRFTISRDNSKNTLYLQMNSLRAEDTALYSCARTVACEVWGQGTLVTVSS

SEQ ID NO: 22956 - protein, 93 aa, Homo sapiens
AASGFTFRDYAMTWVRQVPGKGLEWVSSISGDGRNTYYAESVRGRFTLSRDNSKSTLFLQMNSLRADDTALYYCARTVACEVWGQGTLVTVSS

SEQ ID NO: 22957 - protein, 93 aa, Homo sapiens
AASGFTFRDYAMTWVRQVPGKGLEWVSSINGDGRNTYYAESVRGRFTLSRDNSKSTLFLQMNSLRADDTALYYCARTVACEVWGQGTLVTVSS

SEQ ID NO: 22958 - protein, 92 aa, Homo sapiens
ASGFTFSTYAMSWVRQAPGKGLEWVSSISGSGGSTYYTDSVKGRFTISRDNSKNTLYLQMNSLRAEDTALYSCARTVACEVWGQGTLVTVSS

SEQ ID NO: 22959 - protein, 93 aa, Homo sapiens; identical to SEQ ID NO: 22951

SEQ ID NO: 22960 - protein, 93 aa, Homo sapiens
AASGFTFSTYAMSWVRQAPGKGLEWVSSISGSGGSTFYTDSVKGRFTISRDNSKNTLYLQMNSLRAEDTALYSCARTVACEVWGQGTLVTVSS

SEQ ID NO: 22961 - protein, 93 aa, Homo sapiens
AASGFTFSTYAMTWVRQAPGKGLEWVSSISASGGSTYYTDSVKGRFTISRDNSKNTLYLQMNSLRGEDTALYSCARTVACEVWGQGTLVTVSS

SEQ ID NO: 22962 - protein, 93 aa, Homo sapiens; identical to SEQ ID NO: 22955

SEQ ID NO: 22963 - protein, 92 aa, Homo sapiens
ASGFSFSTYAMTWVRQAPGKGLEWVSSISASGGSTFYTDSVKGRFTISRDNSRNTLYLQMNSLRAEDTALYSCARTVACEVWGQGTLVTVSS

SEQ ID NO: 22964 - protein, 93 aa, Homo sapiens
AASGFTFRDYAMTWVRQVPGKGLEWVSSISGDGRNTYYAESVRGRFTLSRDSSKSTLFLQMNSLRADDTALYYCARTVACEVWGQGTLVTVSS

SEQ ID NO: 22965 - protein, 100 aa, Homo sapiens
KGSGYSFISQWIGWVRQMPGKGLEWMGIIYPGDSDTRYSPSFQGQVTISADKSISTAYLQWNSLKASDTAMYYCARRGDGSETFYTFDYWGQGTLVTVSS

SEQ ID NO: 22966 - protein, 100 aa, Homo sapiens
KGSGYSFTSQWIGWVRQMPGKGLEWMGIIYPGDSDVRYSPSFQGQVTISADKSISTAYLQWSSLKASDTAIYYCARRGDGSETFYTFDYWGQGTLVTVSS

SEQ ID NO: 22967 - protein, 91 aa, Homo sapiens
AASGFTFNNFWMHWVRQAPGKGLVWVSRIDIDGTGTSYADSVKGRFTISRDNAKNTVYLQMNSLRAEDTAVYYCGSVFEHWGPGTLVTVSS

SEQ ID NO: 22968 - protein, 91 aa, Homo sapiens; identical to SEQ ID NO: 22967

SEQ ID NO: 22969 - protein, 90 aa, Homo sapiens
AASGFIFTDFWMHWVRQVPGKGLVWVARIDGEGSGTSYADSVKGRFTVTRDNAKNTLYLQMSSLRVEDTAVYYCGSVFEHWSQGSLVTVS

SEQ ID NO: 22970 - protein, 93 aa, Homo sapiens
AASGFTFSARDMSWVRQAPGKGPEWVSTIYRDGTQTVYADSVRGRFIISRDNSKNTVRLQMNSLRVEDTAVYYCAIDRWLSPWGQGTLVAVSS

SEQ ID NO: 22971 - protein, 93 aa, Homo sapiens
AASGFIFTSRDMSWVRQAPGKGPEWVSTIGLTGGGASYADSVKGRFTISRDNSKNTLYLQMNSLRAEDTAIYHCAIDRWLSPWGQGTLVTVSS

SEQ ID NO: 22972 - protein, 95 aa, Homo sapiens
AASGFSFSSSWMHWVRQAPGKGLVWVSHINSDGSSTTYADSVKGRFTISRDNAKSTVYLQMNSLRAEDTAVYFCARDFSYAMDVWGQGTTVSVSS

SEQ ID NO: 22973 - protein, 95 aa, Homo sapiens
AASGFAFSSHWMHWVRQAPGKGLVWVSHINSDGSSTIYADSVKGRFTISRDNAKNTLYLQMNSLRAEDTAMYYCARDFSYAMDVWGQGTTVTVSS

SEQ ID NO: 22974 - protein, 97 aa, Homo sapiens
ASGYTFTSYGITWVRQAPGRGLEWMGWISTYNGNTDYAQNLQGRVAMTTDTSATTAYLELRSLTSDDTAVYYCARTCPGASCYIIYWGQGTLLTVSS

SEQ ID NO: 22975 - protein, 97 aa, Homo sapiens
ASGYTFSNYGINWLRQAPGQGPEWIGWISTYNGNTDYAPKLQGRVTMTTDTSTSTAYMELRSLRSDDTAVYYCARTCPGASCYIIYWGQGTLITVSS

SEQ ID NO: 22976 - protein, 96 aa, Homo sapiens
AASGFTFSSSSMTWVRQAPGKGLEWVSNIRSNGVDTYYADSVKGRFTISRDNSKNTLSLQMNSLRAEDTAVYYCAKGGYTTPFDYWGQGTLVTVSS

SEQ ID NO: 22977 - protein, 96 aa, Homo sapiens
AASGFTFRSYSMTWVRQAPEKGLEWVSTIRADGSDAFYTDSVKGRFIISRDNSKNTLYLQMNSLRAEDTAIYYCAKGGYTTPFDYWGQGTLLAVSS

SEQ ID NO: 22978 - protein, 96 aa, Homo sapiens
AASGFTFRSYSMTWVRQAPEKGLEWVSTIRADGSDTFYTDSVKGRFIISRDNSKNTLYLQMNSLRAEDTAIYYCAKGGYTTPFDYWGQGTLLAVSS

SEQ ID NO: 22979 - protein, 96 aa, Homo sapiens
AASGFTFSSYAMSWVRQAPGKGLEWVSAISGSGGSTYYADSVKGRFTISRDNSKNTLYLQMNSLRAEDTAIYYCAKGGYTTPFDYWGQGTLLAVSS

SEQ ID NO: 22980 - protein, 96 aa, Homo sapiens
AASGFTFSSYAMTWVRQAPGKGLEWVALIRAGGGSTYYADSVKGRFTISRDNSKDTQYLQMNSLTVEDTAIYYCAKGGYTTPFDYWGQGTLVTVSS

SEQ ID NO: 22981 - protein, 99 aa, Homo sapiens
TVSGGSISDSDYIWAWIRQPPGKGLEWIGDIYYPNGHASYSPSLRSRVTISVDTSNNQVSLRLSSATAADTSTFYCARRLYGSGRIDYWGQGTLVTVSS

SEQ ID NO: 22982 - protein, 98 aa, Homo sapiens
TVSGGSISNSSYYWVWIRQPPGKGLEWIGNIYYSGSTSYNPSLKSRLTISVDTSKNQFSLELSSVTAADTAVYYCARRLYGSGRIDYWGQGTLVTVSS

SEQ ID NO: 22983 - protein, 91 aa, Homo sapiens
ASGYTLTNFAITWVRQAPGQGLEWMGWINNYNGNTKYTQKWQDRVTMTRDTSTNTVYMELRSLTSDDTAVYYCARTTSGDYWGQGTLVTVS

SEQ ID NO: 22984 - protein, 91 aa, Homo sapiens
SGYTFTSYDITWVRQAPGQGLEWMGRINPNNGNTNYAQKLRGRVTISADTSTTTAYMELRSLTSDDTAMYYCARTTSGDYWGQGTLVTVSS

SEQ ID NO: 22985 - protein, 102 aa, Homo sapiens
ISGDSVSSNSAGWNWIRQSPSRGLEWLGRIYYRSKWYSDYAVSVKSRMTINPDTTKNHFSLQLKSVTPEDTAMYYCARGGLVRGAVGWFDPWGQGTLVTVSS

SEQ ID NO: 22986 - protein, 102 aa, Homo sapiens
IFGDSVSSNSAGWNWIRQSPSRGLEWLGRIYYRSKWYSDYAVSVKSRMTIIPDIAKNHFSLQLNSVTPDDTAMYYCARGGLVRGAVGWFDPWGQGTLVTVSS

SEQ ID NO: 22987 - protein, 102 aa, Homo sapiens
ISGDSVSSNSAGWNWIRQSPSRGLEWLGRIYYRSKWYSDYAVSVKSRMTINPDTSKNQFSLQLNSVTSEDTAMYYCARGGLVRGAVGWFDPWGQGTLVTVSS

SEQ ID NO: 22988 - protein, 102 aa, Homo sapiens
ISGDSVSSNTAGWNWIRQSPSRGLEWLARTYYRSKWYFDYAESVKSRITMNPDTSKNQFSLQLNSVTPEDTAVYYCARGGLVRGAVGWFDPWGQGMLVTVAS

SEQ ID NO: 22989 - protein, 94 aa, Homo sapiens
AASGFTFGDYGMSWVRQAPGKGLEWVSGINWNGGSTGYADSVKGRFTISRDNAKNSLYLQMNSLRAEDTALYYCARGPNWFDPWGQGTLVTVSS

SEQ ID NO: 22990 - protein, 94 aa, Homo sapiens; identical to SEQ ID NO: 22989

SEQ ID NO: 22991 - protein, 93 aa, Homo sapiens
TVSGGSISSYYWSWIRQPPGKGLEWIGYIYYSGTTNYNPSLKSRVTISVDTSKNQFSLKLSSVTAADTAVYYCARGGWSLDKWGQGTLVTVSS

SEQ ID NO: 22992 - protein, 96 aa, Homo sapiens
TVSGGSIDAHNWSYWSWLRQPPEKGLEWIGYVFYTGTTNYNPSLESRVTISVDRSKNQFSLRLTSVAAADTATYFCARGGWSLDKWGRGTLVTVSS

SEQ ID NO: 22993 - protein, 93 aa, Homo sapiens
TVSGGSISSYYWTWIRQSPGKGLEWIGYIYYSGSTNYNPSLKSRVTISVDASKNQFSLRLTSVTAADTAVYLCARGGWSLDKWGQGTLVTVSS

SEQ ID NO: 22994 - protein, 95 aa, Homo sapiens
AASGFTFSHYTITWVRQAPGKGLEWVSSISGSGTSTYADSVKGRFTISRDSSKNTVDLQMNSLRAEDTALYYCARGGGGRHFDYWGQGTLVTVSS

SEQ ID NO: 22995 - protein, 96 aa, Homo sapiens
AASGFTFSSYGMSWVRQAPGKGLEWVSTISGSGGGTYYADSVKGRFTISRDNSKNTLYLQMNSLRAEDTAVYYCARGGGGRHFDYWGQGTLVTVSS

SEQ ID NO: 22996 - protein, 94 aa, Homo sapiens
ASGYSFRTFGVSWVRQAPGQGLEWMGWVSPWSGDTHYSPKLQGRVSMTTDAPTKTIYLELRSLRSDDTAVYYCARETVGAPDYWGQGTLVTVSS

SEQ ID NO: 22997 - protein, 94 aa, Homo sapiens
ASGYSFRTFGVSWVRQAPGQGLEWMGWVSPWSGDTHYSAKLQGRVSMTTDAPTKTIYLELRSLRSDDTAVYYCARETVGAPDYWGQGTLVTVSS

SEQ ID NO: 22998 - protein, 94 aa, Homo sapiens
ASGYIFTSYGVSWVRQAPGQGLEWMGWVSPYNGDTHYSPKFQGRVAMTTDTSTTTVYMEMRSLTSDDTAVYYCARETVGAPDYWGQGTLVSVSS

SEQ ID NO: 22999 - protein, 94 aa, Homo sapiens
ASGYIFTSYGVSWVRQAPGQGLEWMGWVSPYNGDTHYAPKFQGRVTMTTDTSTTTVYMEMRSLTSDDTAVYYCARETVGAPDYWGQGTLIIVSS

SEQ ID NO: 23000 - protein, 95 aa, Homo sapiens
VASGFTFSNYWMSWVRQAPGKGLEWVANIKQDGSDKYYVDSVKGRFTISRDNAKNSLYLQMNSLGAEDTAVYYCARSVAAAGDYWGQGTLVTVSS

SEQ ID NO: 23001 - protein, 95 aa, Homo sapiens
AASGFSFSSYWMSWVRQAPGKGLEWVANIKEDGNDKYYVDSVKGRFAISRDNAKNSLYLQMNSLRAEDTAVYYCARSVAAAGDYWGQGTLVTVSS

SEQ ID NO: 23002 - protein, 97 aa, Homo sapiens
AASGFTFINAWMSWVRQAPGKGLEWVGRVKSKTDGGTPDYAAPVKGRFTISRDDSKNTLYLQMNSLKTEDTAVYYCTTETSSGYYYWGQGTLVTVSS

SEQ ID NO: 23003 - protein, 97 aa, Homo sapiens
AASGFAFSNAWMNWVRQAPGKGLEWVGRVKSKSDGGTTDYAAPVRDRFTMSRDDSKNTLYLQMNSLKTEDTAVYYCTTETSSGYYYWGQGTLVTVSS

SEQ ID NO: 23004 - protein, 95 aa, Homo sapiens
ASGFAFGTNYMSWVRQAPGKGPEWVSVITSGGDTFHADSVKGRFTVSRDTSKNTLYLQMNSLRVEDTALYYCAKHLSGSYSFDYWGQGALVTVSS

SEQ ID NO: 23005 - protein, 96 aa, Homo sapiens
AASGFSFSSNYMSWVRQAPGKGLEWVSVITGGADTYYGDSVKGRFTISRDNSKNTLYLQMNSLRVEDTAVYYCAKHLSGSYSFDYWGQGTLVTVSS

SEQ ID NO: 23006 - protein, 96 aa, Homo sapiens
AASGFSFSGNSMTWVRQAPGKGLEWVSAIAGGGTTYYADSVKGRFTISRDNSKNTHYLQMNSLSAEDSALYFCAKHLSGSYSFDYWGQGILVTVAS

SEQ ID NO: 23007 - protein, 96 aa, Homo sapiens
AASGFTFSNNYMTWVRQAPGKGLEWVSAISGSGNTFYADSVKGRFTISRDNSKNTQYLQMNSLRAEDTALYFCAKHLSGSYSFDYWGQGTLVTVSS

SEQ ID NO: 23008 - protein, 98 aa, Homo sapiens
AASGFTFSDYEMNWVRQAPGRGLEWISYISGGSLTYYADSVKGRFTVSRDNAKNSLYLQMNSLSAEDTALYYCAREKAGCGGDCLDYWGQGILVTVSS

SEQ ID NO: 23009 - protein, 99 aa, Homo sapiens
AASGFTFSTYEFNWVRQAPGKGLEWISYISSSGDNVFYVDSVRGRFTVSRDNAKNSLYLQMDSLTAEDTALYYCAREKAGCGGDCLDYWGQGTLVTVSS

SEQ ID NO: 23010 - protein, 104 aa, Homo sapiens
AASGFTFSSYAMSWVRQAPGKGLEWVSSISGSGGSTYYADSVKGRFTISRDNSKNTLYLQMNSLRAEDTAVYYCAKGLLGYCTSTNCYAALDYWGQGTLVTVSS

SEQ ID NO: 23011 - protein, 104 aa, Homo sapiens
AASGFTFSSYAMSWVRQAPGKGLEWVSVISGSGGTTYYADSVKGRFTISRDNSKSALYLQMNTLRAEDTAVYYCAKGLLGYCTSTNCYAALDYWGQGTLVTVSS

SEQ ID NO: 23012 - protein, 96 aa, Homo sapiens
TVSGGSISSYYWSWIRQPAGKGLEWIGRTYTSGSTNYNPSLQSRVTMSVDTSKNQFSLKLSSVTAADTAVYYCARDSNGDRSFDYWGQGTLVTVSS

SEQ ID NO: 23013 - protein, 96 aa, Homo sapiens
TVSGGSISSYYWSWIRQPAGKGLEWIGRIYTSGSTNYNPSLQSRVTMSVDTSKNQFSLKLSSVTAADTAVYYCARDSNGDRSFDYWGQGTLVTVSS

SEQ ID NO: 23014 - protein, 96 aa, Homo sapiens; identical to SEQ ID NO: 23013

SEQ ID NO: 23015 - protein, 96 aa, Homo sapiens
TVSGDSINSYYWSWIRQPAGKGLEWIGRIYHSGITNYNPSLKSRVTMSVDTPKNQFSLRLNSVTAADTAIYYCARDSNGDRSFDYWGQGTLVTVSS

SEQ ID NO: 23016 - protein, 96 aa, Homo sapiens
TVSGGSINNYYWSWIRQPAGKGLEWIGRIYTSGTTNYNPSLKSRVTMSVDTSKNQFSLKLNSVTAADTAMYYCARDSNGDRSFDYWGQGTLVTVSS

SEQ ID NO: 23017 - protein, 96 aa, Homo sapiens
TVSGGSISSYYWSWIRQPAGKGLEWIGRIYTSGSTNYNPSLQSRVTMSVDTSKNQFSLKLSSVSAADTAVYYCARDSNGDRSFDYWGQGTLVTVSS

SEQ ID NO: 23018 - protein, 94 aa, Homo sapiens
AASGFTFSSYEMNWVRQAPGKGLEWLSYISSGGTTIYYADSVKGRFTISRDNAKNSLYLQVNSLRAEDTAVYYCARSEGPFDYWGQGTLVTVSS

SEQ ID NO: 23019 - protein, 94 aa, Homo sapiens
AASGFTFSNYEMNWVRQAPGKGLEWLSYITSSGDTIYYADSVKGRFTISRDNAKNSLYLQMNSLRAEDTAVYYCARSEGPFDYWGQGTLVTVSS

SEQ ID NO: 23020 - protein, 94 aa, Homo sapiens
AASGFTFSSYEMNWVRQAPGKGLEWVSYITSSGDTIYYADSVKGRFTISRDNSKNSLYLQMNSLRAEDTAVYYCARSEGPFDYWGQGTLVTVSS

SEQ ID NO: 23021 - protein, 94 aa, Homo sapiens
AASGFTFSSYEMNWVRQAPGKGLEWVSYITSSGDTIYYADSVKGRFTISRDNAKNSLYLQMNSLRVEDTAVYYCARSEGPFDYWGQGTLVTVSS

SEQ ID NO: 23022 - protein, 98 aa, Homo sapiens
TVFGASLSNHYWSWIRQSAGRGLEWIGRIYGSGTNNYNPSLKSRVTMSVDTSNNQLSLKLSSVTAADTAMYYCARGPYCGGDCYFDSWGLGTLVTVSS

SEQ ID NO: 23023 - protein, 98 aa, Homo sapiens
TVSGGSINNYYWSWIRQPAGKGLEWIGRIYTSGSTNYNPSLKSRVTMSVDTSKNQFSLRLGSVTAADTAVYYCARGPYCGGDCYFDSWGQGTQVAVSS

SEQ ID NO: 23024 - protein, 99 aa, Homo sapiens
AASGFTFTNYPMHWVRQAPGKGLEWVAVIAYDGSIKIYADSVKGRFTISRDDSKNTVYLQVSSLRPEDTAVYFCARDLFRGAPDYLDYWGLGTLVTVSS

SEQ ID NO: 23025 - protein, 99 aa, Homo sapiens
AASGFTFSSYPMHWVRQAPGKGLEWVAVISYDGNVRLYAESVKGRFTISRDDSKNTLFLQMDSLRAEDTAVYYCARDLFRGAPDYLDYWGLGTLVTVSS

SEQ ID NO: 23026 - protein, 102 aa, Homo sapiens
VGSGFTFSHYEMNWVRQTPGKGLEWISYISSSGDTKYYADSVKGRFTISRDNAKNSLFLQMNSLRAEDTAVYYCARGGYYYDSSGYYYSDYWGQGTLVTFSS

SEQ ID NO: 23027 - protein, 102 aa, Homo sapiens
AASGFTFSSYEMNWVRQSPGKGLEWVSYISSSGNTIYYADSVKGRFTISRDNAKNSVYLQLNSLGAEDTAVYYCARGGYYYDSSGYYYSDYWGQGTLVTVSS

SEQ ID NO: 23028 - protein, 93 aa, Homo sapiens
AASGFTFSSYGMHWVRQAPGKGLEWVAVISYDGSNKYYADSVKGRFTISRDNAKNSLYLQMNSLRAEDTAVYYCARSGGMDVWGQGTTVTVSS

SEQ ID NO: 23029 - protein, 92 aa, Homo sapiens
AASGFTFRSYAMHWVRQAPGKGLEWVAVISNDGNEKYEDSVKGRITISRDNSKNTLYLQMNSLRAEDTAVYHCARSGGMDVWGQGTTVTVSS

SEQ ID NO: 23030 - protein, 95 aa, Homo sapiens
AASGFTFSGYWMHWVRQAPGKGLVWVSRIKSDGNNTTYADSVKGRFTISRDNAKNTLYLQMNSLRAEDTAIYYCARDRSGAFDYWGQGTLVTVSS

SEQ ID NO: 23031 - protein, 95 aa, Homo sapiens
AASGFTFSNSWMHWARQAPGKGLVWVSRINSDGSSTNYADSVKGRFTISRDNAKNTLDLQMNSLRAEDTAVYYCARDRSGAFDYWGQGALVTVSS

SEQ ID NO: 23032 - protein, 98 aa, Homo sapiens
VSGYSISNGYYWGWIRQPPEGGLEWIASMSYAGSTYYNPSLRSRVTISLDTSKNQFSLKLTSVTAADSAMYYCATYRGYSYAYYFDYWGQGTLVTVSS

SEQ ID NO: 23033 - protein, 99 aa, Homo sapiens
TVSGYSISSGYYWGWIRQPPGKGLEWIASTHHSESTYYNPSLRSRVTISLDTSKNQFSLRLSSVTAEDTAVYYCATYRGYSYAYYFDYWGQGTLVTVSS

SEQ ID NO: 23034 - protein, 100 aa, Homo sapiens
AASGFTFTNYWMSWVRQVPGKGLEWVASIRFVGDEKSYVDSVKGRFTISRDNAKNSLYLQMTSLRAEDTALYYCARGPPYGARTDYFDYWGQGTLVTVSS

SEQ ID NO: 23035 - protein, 100 aa, Homo sapiens
AASGFTFRSHWMSWVRQPPGKGLEWVASIKQGGSETSYVDSVKGRFTISRDDARTLLYVQLNSLRVEDSAVYYCARGPPYGARTDYFDYWGQGTLVTVSS

SEQ ID NO: 23036 - protein, 94 aa, Homo sapiens
TVSGYSISSGYYWGWIRQPPGKGLEWIGSMYYSGSTYYKPSLKSRVTISLDTSKNQFSLKLTSVTAADTAVYYCARGTPNFDYWGQGTLVTVSS

SEQ ID NO: 23037 - protein, 94 aa, Homo sapiens
TVSGYSISSGYYWGWIRQPPGKGLEWIGSIYHSESTYYNPSLKSRVTISVDTSKNQFSLKLSSVTAADTAVYYCARGTPNFDYWGQGTLVTVSS

SEQ ID NO: 23038 - protein, 96 aa, Homo sapiens
EASGFTFSSYWMSWVRQAPGKGPEWVANMNVGGSAIYYLDSVKGRFTISRDNAKNSLYLQMNSLRAEDMAVYYCARDAGWGAYDIWGQGTMVIVSS

SEQ ID NO: 23039 - protein, 96 aa, Homo sapiens
VASGFIFSQSWMTWVRQAPGKGLDDVAMINQDGSGKYYVDSVRGRFTISRDNAKNSLYLQMDSLRAEDTAIYYCARDAGWGAYDIWGRGTMVIVSS

SEQ ID NO: 23040 - protein, 95 aa, Homo sapiens
AASGFTISNSWMNWVRQAPGKGLEWVANIKKDGSEENYVESVEGRFTISRDNAMNSLYLQMNTLRADDAGVYYCASGTGWLIDYWGRGTLVIVSS

SEQ ID NO: 23041 - protein, 95 aa, Homo sapiens
AASGSTFSNSWVNWVRQAPGKGLEWVANIKKDGREKYYVDSVKGRFTISRDNAENSVYLQMNSLRAEDTAVYFCASGTGWLIDYWGQGMLVTVSS

SEQ ID NO: 23042 - protein, 95 aa, Homo sapiens
AASGSTFSNSWVNWVRQAPGKGLEWVANIKKDGSEERYVDSVRGRFTISRDNAKNSVYLQMNSLRADDTAVYFCASGTGWLIDYWGQGMLVTVSS

SEQ ID NO: 23043 - protein, 95 aa, Homo sapiens
TVSGGSISSGSYFWSWIRQPAGKGLEWIGRIYSSGGTNYNPSLKSRVTISIDTSKNQFSLKLSSVTAADTAVYYCARANWYFDLWGRGTLVTVSS

SEQ ID NO: 23044 - protein, 95 aa, Homo sapiens
TVSGASISSDFSFWSWIRQPAGKGLEWIGRIYNTGGTNYNPSLESRVTLSVDTSKNQFSLKLSSVTAADTAVYYCARANWYFDLWGRGTLVTVSS

SEQ ID NO: 23045 - protein, 93 aa, Homo sapiens
AASGFSFSRFWMNWVRQAPGKGLEWVANIKDDGSETHYADSVKGRFTISRDNAKSSLYLQLNSLRGEDTAVYYCTIGHYHDYWAQGTLVTVSS

SEQ ID NO: 23046 - protein, 91 aa, Homo sapiens
SGFTFNKFIMNWVRQAPGKGLEWVANVDPDGSQKYYVDSVKGRFTISRDNAQNSVYLQMNTLRADDTGFYFCTIGHYHDYMGQGTLVTVSS

SEQ ID NO: 23047 - protein, 91 aa, Homo sapiens
SGFTFNKFIMNWVRQAPGKGLEWVANVDPDGSQKYYVDSVKGRFTISRDNAQNSVYLQMNTLRADDTGFYFCTIGHYHDYTGQGTLVTVSS

SEQ ID NO: 23048 - protein, 93 aa, Homo sapiens
ASGYTFTDYYIHWVRQAPGQGLEWMGWLKPKNGATNYAQRFEGRITMTRDTSISTAYMELTRLTSDDTAVYYCARNSSGYLYWGQGTLVTVSS

SEQ ID NO: 23049 - protein, 93 aa, Homo sapiens
ASGYTFTDYYMHWVRQAPGQGLEWMGWIKPNSGGTKYEQRFQGRVTMTRDTSTSTAYMELSGLRSDDTAIYYCARNSSGYLYWGQGTLVTVSS

SEQ ID NO: 23050 - protein, 93 aa, Homo sapiens; identical to SEQ ID NO: 23049

SEQ ID NO: 23051 - protein, 93 aa, Homo sapiens
ASGYTFTDYYIHWVRQAPGQGLEWMGWSKPINGATNYALKFQGRVTMTRDTSISTAYMELSSLSSDDTAIYYCARNSSGYLYWGQGTLVTVSS

SEQ ID NO: 23052 - protein, 93 aa, Homo sapiens
ASGYTFTDYYIHWVRQAPGQGLEWMGWIKPRNGATNYAQRFEGRVTMTRDTSITTAYMELSRLTFDDTAVYYCARNSSGYLYWGQGTLVTVSS

SEQ ID NO: 23053 - protein, 101 aa, Homo sapiens
TVSGGSISDYYWSWIRQSPGKGLEWIGYINDRETTNYNPSLKSRVTISVDTSKNQFSLNLRSVTAADTALYYCARAEAAAGSHYYYGLDVWGQGTTVTVSS

SEQ ID NO: 23054 - protein, 101 aa, Homo sapiens
TVSGGSISGYYWSWIRQPPGKGLEWIGYIYYNEITNYNPSLKSRVTMSVDTPKNQFSLNLSSVTAADTAVYYCARAEAAAGSHYYYGLDVWGQGTTVTVSS

SEQ ID NO: 23055 - protein, 94 aa, Homo sapiens
AASGFTFRNYWVSWVRQAPAKGLEWVANIKQDGSEKYYVDSVKGRFTVSRDNAKNSLYLQMNNLRAEDTAVYYCARVTPAIQYWGQGTLVTVSS

SEQ ID NO: 23056 - protein, 94 aa, Homo sapiens
AASGFTFSSYWMTWVRLAPGKGLEWVANIKQDGRDKYYVDSVEGRFTISRDNAKNSLFLQMNSLRAEDTAVYYCARVTPAIQYWGQGTLVTVSS

SEQ ID NO: 23057 - protein, 93 aa, Homo sapiens
AASGFTFSSSAMTWVRQAPGKGLEWVSTITSSGDSTYYADSVKGRFTISRANSRDTLYLQMNSLRAEDTAVYYCAKPNGMDVWGQGTTVTVSS

SEQ ID NO: 23058 - protein, 93 aa, Homo sapiens
AASGFTFSNYPMSWVRQAPGKGLEWVSTISGSGASTYYADSVKGRFTISRDNSKNTLYLQMSSLRAEDTAVYYCAKPNGMDVWGQGTTVTVSS

SEQ ID NO: 23059 - protein, 94 aa, Homo sapiens
ASGYTFTSYDINWVRQATGQGLEWMGGMNPTSGYTTYAQKFQGRVTMTRDTSISTAYMELTSLRSEDTAVYYCARGVDEGLDYWGQGTLVTVSS

SEQ ID NO: 23060 - protein, 94 aa, Homo sapiens
ASGYTFTSLDMNWVRQAPGQGLEWMGWVSPNSGNAGSAQKFQGRVTMTRDTPINTFYMELSGLTSDDTAIYYCARGVDEGLDYWGQGTAITVSS

SEQ ID NO: 23061 - protein, 93 aa, Homo sapiens
VSGFTLSSHEVNWVRQAPGKGLEWVSYSSHGSTTFFADSVKGRFTVSRDNAKNSVYLQMNSLRVDDTAVYYCARGPLAPFDYWGQGTLVTVSS

SEQ ID NO: 23062 - protein, 94 aa, Homo sapiens
AASGFTFRSYEMNWVRQAPGKGLEWLSYISSGSTIFYADSVKGRFTVSRDNAKNSLYLQMNSLRAEDTAVYYCARGPLAPFDYWGQGTLVTVSS

SEQ ID NO: 23063 - protein, 94 aa, Homo sapiens
AGSGFTLSTYEVNWVRQAPGKGLEWVSYSSYGSTIFYADSVKGRFTISRDNANNSVYLQMNSLRVDDTAVYYCARGPLAPFDYWGQGTLVTVSS

SEQ ID NO: 23064 - protein, 94 aa, Homo sapiens
ASGFTFTNYAMSWVRQPPGKGLEWVSAITGDGGTTFYADSVKGRFTVSRDNFRNTIDLQVNSLRADDTAVYYCAKGNWGHLDYWGQGTLVTVSS

SEQ ID NO: 23065 - protein, 95 aa, Homo sapiens
ATSGFTFRDYAMSWVRLAPGKGLEWVSAMNGNDPGTYYADSVKGRFTVSRDNSKNTLYLQMNSLRAEDTAVYYCAKGNWGHLDYWGQGTLVTVSS

SEQ ID NO: 23066 - protein, 95 aa, Homo sapiens
AASGFTFTNYAMSWVRLAPGKGLEWVSAVTGNGIGTFYADSVKGRFTISRDNSKNTLYLQMNSLKAEDTAIYYCAKGNWGHLDYWGQGTLVTVSS

SEQ ID NO: 23067 - protein, 95 aa, Homo sapiens
AASGFTFTSYAMSWVRLAPGKGLEWVSAVTGDGGGTFYADSVKGRFTISRDNSKNTLYLQMNSLTADDTATYYCAKGNWGHLDYWGRGTLVTVSS

SEQ ID NO: 23068 - protein, 95 aa, Homo sapiens
AASGFPFTSYAMSWVRLAPGRGLEWVSAVTGDGAVTFYADSVKGRFTISRDNSKNTLYLQMNSLKAEDTAIYYCAKGNWGHLDYWGQGTLVTVSS

SEQ ID NO: 23069 - protein, 95 aa, Homo sapiens
AASGFTFTSYAMSWVRLAPGKGLEWVSAVTGDGARTFYADSVKGRFTISRDNSKNTLYLQMNSLKAEDTAIYYCAKGNWGHLDYWGQGTLVTVSS

SEQ ID NO: 23070 - protein, 98 aa, Homo sapiens
AASGFIFTNHAMHWVRQNPDKGLEWVALILKDGSEKSYGDSVKGRFTISRDDSKNTVFLQMDSLRPEDTAVYYCVKDDTTGFFYVDYWGQGTPVTVSS

SEQ ID NO: 23071 - protein, 98 aa, Homo sapiens
AASGFTFSRHGMHWVRQAPGKGLEWVAIIFNDGSQHYYADSVKGRFTVSRDDSKNTLYLQMNSLRVEDTALYYCVKDDTTGFFYVDYWGQGTLVTVSS

SEQ ID NO: 23072 - protein, 94 aa, Homo sapiens
AASGFTFSAHTMSWVRQSPGKGLEWVSTIDSRDLTTSYADSVKGRFTISRDNSRNSLYLQMNSLRADDTAVYYCAQGLKDLDYWGQGALVTVSS

SEQ ID NO: 23073 - protein, 94 aa, Homo sapiens
AASGFTFSRHVMSWVRQAPGKGLEWVSSISNIGDSTYYADSVKGRFTISRDNSKNTLYLQLNSLRAEDTAVYYCAQGLKDLDYWGQGALATVSS

SEQ ID NO: 23074 - protein, 98 aa, Homo sapiens
VASGFAFSSSAMSWVRQAPGKGLEWVSAISGSGESTYYADSVKGRFTFSRDNSKNTLSLQMNSLRLEDTAIYYCAKSLGSGTYSFDYWGLGTLVTVSS

SEQ ID NO: 23075 - protein, 98 aa, Homo sapiens
AASGFTFSSYAMSWVRQAPGKGLEWVSLIHSSGTNTFYVDSVKGRFTISRDNSKNMVYLQMNSLRVEDTAVYYCAKSLGSGTYSFDYWGQGTLVTVSS

SEQ ID NO: 23076 - protein, 97 aa, Homo sapiens
ASGFTFTNYAMSWVRQAPGMGLEWVSLIYADGSRTSYADSVKGQFILSRDNSKNTVFLQMNSLRAEDTTVYYCAKSLGSGTYSFDYWGQGILVTVSS

SEQ ID NO: 23077 - protein, 97 aa, Homo sapiens
ASGFTFTNYAMSWVRQAPGMGLEWVSLIYADGSRTSYADSVKGQFILSRDNSKNTVFLQMNSLRAEDTAVYYCAKSLGSGTYSFDYWGQGILVTVSS

SEQ ID NO: 23078 - protein, 98 aa, Homo sapiens
GASGFTFSNYAMSWVRQAPGKGLEWVSLIDNSGSGSTYADSVRGRFTISRANSKNMVYVQMNSLRAEDTAVYYCAKSLGSGTYSFDYWGQGTLVTVSS

SEQ ID NO: 23079 - protein, 93 aa, Homo sapiens
AASGFTFSSYWMSWVRQAPGKGLEWAANIKQDGSEKYYVDSVKGRFTISRDNAKNSLYLQMNSLRAEDTAVYYCGVSRTFDYWGQGTLVTVSS

SEQ ID NO: 23080 - protein, 91 aa, Homo sapiens
ASGLTFSSYWMSWVRQAPGKGLEWVANIKQDGSDKYYVDSVMGRFTISRDNAKNSLYLQMNSLRADDTAVYYCGVSRTFDYWGQGTLVTVS

SEQ ID NO: 23081 - protein, 92 aa, Homo sapiens
AASGFPFSRFWWSWVRQAPGKGLEWLANIKQDGSEENYVDSVMGRFTISRDNAKNSLYLQMNSLRADDTAVYYCGVSRTFDYWGQGTLVTVS

SEQ ID NO: 23082 - protein, 91 aa, Homo sapiens
ASGLTFSSYWMSWVRQAPGKGLEWVANIRQDGSEKYYVDSVMGRFTISRDNAKNSLYLQMNSLRADDTAVYYCGVSRTFDYWGQGTLVTVS

SEQ ID NO: 23083 - protein, 99 aa, Homo sapiens
AASGFTFDSYGMHWVRQAPGKGLEWVSVIWYDGSNKYYADSVKGRFTISRDSSKNTLYLQMNSLRAEDTAVYYCAKGAGYNSGWYFDYWGQGTLVTVSS

SEQ ID NO: 23084 - protein, 99 aa, Homo sapiens
AASGFTFSSYGMHWVRQAPGKGLEWVAVIWYDGSNKYYADFVRGRFTISRDSSNNTLYLQMNSLRAEDTAVYYCAKGAGYNSGWYFDYWGQGTLVTVSS

SEQ ID NO: 23085 - protein, 99 aa, Homo sapiens; identical to SEQ ID NO: 23084

SEQ ID NO: 23086 - protein, 97 aa, Homo sapiens
AASGFTFSNYAMSWVRQAPGKGLEWVSAISGSGGTTSYADSVKGRFTISRDNSKNTLYLQMNSLRAEDTAIYYCAKGSSGYYYFDYWGQGTLVTVSS

SEQ ID NO: 23087 - protein, 97 aa, Homo sapiens
AASGFTFSSHAMSWVRQAPGKGLEWVSAIVGSGGRTSYADSVKGRFTISRDNSKNTLYLQMNSLRAEDTAVYYCAKGSSGYYYFDYWGQGTLVTVSS

SEQ ID NO: 23088 - protein, 96 aa, Homo sapiens
AASGFDFSNSWMSWVRQAPVRGLEWVADMNQDGSVKVYGDSVKGRFTISRDNAKNSVFLQLDSLSAEDTAVYYCARDPHCGALDYWGQGALVTVSS

SEQ ID NO: 23089 - protein, 96 aa, Homo sapiens
AASGFDLSNSWMSWVRQAPVRGLEWVADMNQDGSVKVYGDSVKGRFTISRDNAKNSVFLQLDSLSAEDTAVYYCARDPHCGALDYWGQGALVTVSS

SEQ ID NO: 23090 - protein, 96 aa, Homo sapiens
AASGFTFGSSWMSWVRRAPGKGLEWVADINGDGSTIVYVDSVKGRFTVSRDNAKNSVYLQMNSLRVEDTAVYFCARDPHCGALDYWGQGTLVTVSS

SEQ ID NO: 23091 - protein, 99 aa, Homo sapiens
AASGFTFTGYDMHWVRQAPGKGLEWVAVISIDGSIKYYSDSVKGRFTISRDNSKNTLYLQMNSLRAEDTAIYYCARDFRLGAPDYLDYWGQGTLVTVSS

SEQ ID NO: 23092 - protein, 99 aa, Homo sapiens
AASGFTFTDYDMHWVRQAPGKGLEWVAVISIDGSIKYYSDSVKGRFTISRDNSKNTLYLQMNSLRAEDTAIYYCARDFRLGAPDYLDYWGQGTLVTVSS

SEQ ID NO: 23093 - protein, 100 aa, Homo sapiens
AASGFNFAMYEIHWVRQAPGKGLEWVAVMSTGSGTIRLYTDSVRGRFTISRDDTKNTLFLQMNSLRADDTAVYYCARDFRLGAPDYLDYWGQGTLVTVSS

SEQ ID NO: 23094 - protein, 94 aa, Homo sapiens
VASGFAFSTYGMHWVRQAPGKGLEGVATLLYDASNAYYSDSVQGRFSISRDISKNTLYLQMNSLRAEDTAVYYCARDGISGIDYWGQGTLVTVS

SEQ ID NO: 23095 - protein, 94 aa, Homo sapiens
VASGFAISRYGMHWVRLAPDKGLEWVTLLTSDSTEKHYIDSVRGRFTISKDNSKNMLFLQMNSLRVEDTATYYCARDGISGIDYWGQGSLVTVS

SEQ ID NO: 23096 - protein, 95 aa, Homo sapiens
VASGFAFSTYGMHWVRQTPGKGLEGVATLLYDASNEYYLDSVKGRFTISRDISKNTLYLQMDSLRAEDTAVYYCARDGISGIDYWGQGTLVTVSS

SEQ ID NO: 23097 - protein, 95 aa, Homo sapiens
AASGFTFSSLWMNWVRQVPGKGLEWVAIIRQDGSETKYVDSVKGRFTISRDNAENSVYLQMNSLRAEDTALYYCAGGTGWLMEFWGQGTLATVSS

SEQ ID NO: 23098 - protein, 95 aa, Homo sapiens
AASGLTFSSLWMNWVRQVPGKGLEWVAIIRQDGSETKYVDSVKGRFTISRDNAENSVYLQMNSLRAEDTALYYCAGGTGWLMEFWGQGTLATVSS

SEQ ID NO: 23099 - protein, 94 aa, Homo sapiens
ASGFTFSSLWMNWVRQVPGKGLEWVAIIRQDGSETKYVDSVKGRFTISRDNAENSVYLQMNSLRAEDTALYYCAGGTGWLMEFWGQGTLATVSS

SEQ ID NO: 23100 - protein, 95 aa, Homo sapiens
AASGLTFRSYWMNWVRQAPGKGLEWVAIIKQGGTEQKYVDSVRGRFTISRDDAKSSLYLQMNSLRADDTAVYYCAGGTGWLMEFWGRGVLITVSS

SEQ ID NO: 23101 - protein, 93 aa, Homo sapiens
AASGFTFSANLMTWVRQAPGKGLEWVANINQDGSEKYYVDSVKGRFTISRDNAKNSLYLQMDSLRAEDTAVYFCARLRGGNNWGQGILVTVSS

SEQ ID NO: 23102 - protein, 93 aa, Homo sapiens
AVSGLTFSSNLMTWVRQAPGKGLEWVANINQDGSEKYYGDSAKGRFTISRDNARNSLFLQMNSLRVEDTAVYYCARLRGGNNWGQGTLVTVSS

SEQ ID NO: 23103 - protein, 93 aa, Homo sapiens; identical to SEQ ID NO: 23101

SEQ ID NO: 23104 - protein, 96 aa, Homo sapiens
AASGFSFSNYAMHWVRQAPGKGLQWVALIWYDGTNEHYADSVKGRFTISRDNSKNTLFLQMNSLRAEDTAVYYCAREKKEMATDYWGQGILVTVSS

SEQ ID NO: 23105 - protein, 96 aa, Homo sapiens; identical to SEQ ID NO: 23104

SEQ ID NO: 23106 - protein, 96 aa, Homo sapiens
AASGFSFSDYAMHWVRQAPGKGLEWVAVIWYDGSNKFHADSVKGRFTISRDNSKNMLYLQMNSLRVEDTAVYYCAREKKEMATDYWGQGTLVTVSS

SEQ ID NO: 23107 - protein, 95 aa, Homo sapiens
SGYNFDTFWIGWVRQMPGKGLEWMGIIYPGDSDVRYSPSFQGQVTISADRSTNTAYLQWTSLKASDTAMYFCARRGGSLNFFDYWGQGVLVTVSS

SEQ ID NO: 23108 - protein, 96 aa, Homo sapiens
GSGYSFNTYWIGWVRQMPGKGLEWMGIIYPGDSDTRYSPSFQCQVTISADRSSNTAYLQWSSLKASDTAMYFCARRGGSLNFFDYWGQGVLVTVSS

SEQ ID NO: 23109 - protein, 96 aa, Homo sapiens
GSGYSFNTYWIGWVRQMPGKGLEWMGIIYPGDSDTRYSPSFQGQVTISADRSSNTAYLQWSSLKASDTAMYFCARRGGSLNFFDYWGQGVLVTVSS

SEQ ID NO: 23110 - protein, 97 aa, Homo sapiens
KGSGYTFTNSWIGWVRQMPGKGLEWMGIIYPGDSDTRYSPSFQGQVTISADKSINIAYLQWSSLEASDTAMYYCARRGGSLNFFDYWGQGTLVTVSS

SEQ ID NO: 23111 - protein, 97 aa, Homo sapiens
KGSAYTFDNYWIGWVRQMPGKGLEWMGIIYPADSDTRYSPSFQSQVTISADKSIATAYLQWTSLKASDTAIYYCARRGGSLNFFDYWGQGTLVTVSS

SEQ ID NO: 23112 - protein, 96 aa, Homo sapiens
GSGYNFDTYWIGWVRQMPGKGLEWMGIIYPGDSDTRYSPSFQGRVTMSVDVSTHIAYLQWSSLEASDTAIYFCARRGGSLNFFDYWGQGVLVTVSS

SEQ ID NO: 23113 - protein, 99 aa, Homo sapiens
AASGFTFRNFVMHWVRQAPGKGLEWIGALSSDGSIPYFTKSDSLRDRFVMSRNNSRNTLFLQVNDVRPEDTATYFCAREGGSGSSPDYWGQGTLVIVSS

SEQ ID NO: 23114 - protein, 97 aa, Homo sapiens
AASGFSFSSYAMQWVRQAPGKGLEWVAVTPYDGSYNYHAGSVKGRFTISRDNSKNTLYLQMNSLRDEDTAVYYCAREGGSGSSPDYWGQGTLVTVSS

SEQ ID NO: 23115 - protein, 102 aa, Homo sapiens
TVSGFTLGDYALNWVRQAPGEGLEWVGLIRNDAYGGTTEYAASVKGRFTISRDDSKTIAYLQMNSLKIEDTAVYYCARGRTVVGAKYYFDYWGLGTLVTVSS

SEQ ID NO: 23116 - protein, 102 aa, Homo sapiens
TPSGFTFGDYAMTWVRQAPGKGLEWVGFIRSKEYGGTTEYDASVRGRFTISRDDSKSIAYLQMNSLKTEDTAVYYCARGRTVVGAKYYFDYWGQGILVTVSS

SEQ ID NO: 23117 - protein, 102 aa, Homo sapiens
TASGFSFEDYGMGWVRQAPGRGLEWVSFIRSYIYGGSAENAASVKGRFIVSRDDSKNIAYLQMNSLDTGDTAIYYCGRGLTVTGSKYYFDNWGQGTLVTVSS

SEQ ID NO: 23118 - protein, 101 aa, Homo sapiens
ASGFSLGDYGMGWVRQAPGRGLEWVSFIRSKTYGGSAENAASVKGRFIVSRDDSKNIAYLQMNSLDTEDTAIYYCGRGLTVTGSKYYFDNWGQGTLVTVSS

SEQ ID NO: 23119 - protein, 102 aa, Homo sapiens
TTSGYTFVDFGLGWVRQAPGKGLEWVAFARSKLYGGAPEYAAAVKGRFTVSRDDSNSIAHLHMDSLQTEDTAVYYCGRGLTVTGSKYYFDNWGQGTLVTVSS

SEQ ID NO: 23120 - protein, 101 aa, Homo sapiens
ASGFSLGDYGMGWVHQAPGRGLEWVSFIRSKTYGGSAENAASVKGRFIVSRDDSKNIAYLQMNSLDTEDTAIYYCGRGLTVTGSKYYFDNWGQGTLVTVSS

SEQ ID NO: 23121 - protein, 98 aa, Homo sapiens
ASGFLFSEYTMHWVRQAPGKGLEWVAVISHHGIISYYADSLKGRFTISRDNSKNTLYLQMSSLRPDDTAIYYCARDPVPGVPDYFDYWGQGTLVTVSS

SEQ ID NO: 23122 - protein, 99 aa, Homo sapiens
ATSGFIFSDYVIHWVRQAPGKGLEWVAVMSSGGSIIIYTDSVKGRFTISRDNSQNTLYLEMNSLRPEDTAVYYCARDPVPGVPDYFDYWGQGTLVTVSS

SEQ ID NO: 23123 - protein, 97 aa, Homo sapiens
AASGFSFRTYGIHWVRQAPGKGLEWVAVVSYDGNEQYYADSVKGRFIISRDNSKNTVFFQMNSLRPEDTAVYYCAKESDGHSEIDYWGQGTLVAVSS

SEQ ID NO: 23124 - protein, 97 aa, Homo sapiens
AASGFTFSSYSIHWVRQTPDKGLEWVAVISRDASEKFYAHSVKGRFTISRDNSRNTLFLQMISLRPEDTAVYYCAKESDGHSEIDYWGQGTLVTVSS

SEQ ID NO: 23125 - protein, 97 aa, Homo sapiens
AASGFTFSAYSIHWVRQTPDKGLEWVAVISSDGSQKFYADSVKGRFTISRDNSRNTLFLQMISLRPEDTAVYYCAKESDGHSEIDYWGQGTLVTVSS

SEQ ID NO: 23126 - protein, 94 aa, Homo sapiens
AASGFTFSTYWMNWVRQAPGKGLEWVANIKEDGSEKWYADSVKGRFTISRDNAKNSLYLQMNSLRVEDTALYYCARGRLVGAYWGQGTLVTVSS

SEQ ID NO: 23127 - protein, 94 aa, Homo sapiens
VASGFVFGGSWMNWVRQAPGKGLEWVASINEEGSEKYYVDSVKGRFTISRDNAKNSLYLQMSSLRTDDTAVYYCARGRLVGAYWGQGTLVTASS

SEQ ID NO: 23128 - protein, 94 aa, Homo sapiens
AASGFTFSTYWMNWVRQAPGKGLEWVANIKEDGSEIWYADSVKGRFTISRDNAKNSLYLQMNSLRAEDTAVYYCARGRLVGAYWGQGTLVTVSS

SEQ ID NO: 23129 - protein, 107 aa, Homo sapiens
TQTLTLTCTFSGFSLSTSGMCVTWIRQPLGKALEWLALIEWDDDEYYNASLKTRLTISKDTSKNQVVLTMTNMDPVDTATYYCARSYGSGSYYNDYWGQGTLVTVSS

SEQ ID NO: 23130 - protein, 107 aa, Homo sapiens
TQTLTLTCTFSGFSLSTSGMCVSWIRQPPGKALEWLARIDWDDDKYYSTSLKTRLTISKDTSKNQVVLTMTNMDPVDTATYYCARSYGSGSYYNDYWGQGTLVTVSS

SEQ ID NO: 23131 - protein, 107 aa, Homo sapiens
TQTLTLTCTFSGFSLSTSGMCVSWIRQPPGKALEWLARIDWDDDKYYTTSLKTRLTISKDTSKNQVVLTMTNMDPVDTATYYCARSYGSGSYYNDYWGQGTLVTVSS

SEQ ID NO: 23132 - protein, 107 aa, Homo sapiens
TQTLTLTCTFSGFSLSTSGMCVTWIRQPLGKALEWLALIEWDDDKYYNASLKTRLTISKDTSKNQVVLTMTNMDPVDTATYYCARSYGSGSYYNDYWGQGTLVTVSS

SEQ ID NO: 23133 - protein, 93 aa, Homo sapiens
ASGFTFSDYYMNWIRQAPGKGLEWVSYISQYGGDTNYADSVMGRFTISRDNADNSVYLQMNDLRAEDTAVYYCVKTARLADVWGNGTTVTVSS

SEQ ID NO: 23134 - protein, 93 aa, Homo sapiens
ASGFTFTDYYMNWIRQAPGKGLEWVSYIGQHGRDTNYADSVMGRFTISRDNVDNSVYLQMRDLRAEDTAIYYCVKTARLADVWGNGTTVTVSS

SEQ ID NO: 23135 - protein, 94 aa, Homo sapiens
VASGFTFNDYYMNWIRLAPAKGLEWIAYISQSGHDIQYADSVKGRFTISRDNAENSVYLQMNSLRVDDTAVYYCVKTARLADVWGQGTTVTVSS

SEQ ID NO: 23136 - protein, 93 aa, Homo sapiens
ASGFTFSDYYMNWIRQAPGKGPEWVSYISQHGGDTNYADSVMGRFTISRDNADNSVYLQMNDLRAEDTAVYYCVKTARLADVWGNGTTVTVSS

SEQ ID NO: 23137 - protein, 94 aa, Homo sapiens
AASGFSLTSTSMSWVRQIPGKRLEWVSMLSDTGRDTFYADSVKGRFTMSRDTATNVFYLQMNSLRDEDTALYYCARDGWADAFDIWGQGTMVTV

SEQ ID NO: 23138 - protein, 96 aa, Homo sapiens
AASGFNFSDSAMSWVRQAPGEGLQWVSLIHPNGRDRFYADSVKGRFTLSRDNANNSLYLQMNSLRPEDTAVYFCARDGWADAFDIWGQGTVVTVSS

SEQ ID NO: 23139 - protein, 94 aa, Homo sapiens
VASGFTVISNYMSWVRQPPGKGLEWVTMIYSGGDTYYTDSVKGRFTISRDNSKNTLYLQMNSLRAEDTAVYYCARWTGTFYDYWGQGTLVTVSS

SEQ ID NO: 23140 - protein, 94 aa, Homo sapiens
VASGFTVFSNYMSWVRQAPGKGLEWVTMIYSGGDTYYTDSVKGRFTISRDNSKNTLYLQMNSLRAEDTAVYYCARWTGTFYDYWGQGTLVTVSS

SEQ ID NO: 23141 - protein, 94 aa, Homo sapiens
AASGFTVSSNYMSWVRQAPGKGLEWVSMIYSSGITHYTDSVKGRFTISRDNSQNTLYLQMNSLRAEDTALYYCARWTGTFYDYWGQGTLVTVSS

SEQ ID NO: 23142 - protein, 94 aa, Homo sapiens
VASGFTVINNYMSWVRQAPGKGLEWVTIIYAGGDTYYRDSVQGRFTISRDSSKNTLYLQMNSVRAEDTAFYYCARWTGTFYDYWGQGTLVTVSS

SEQ ID NO: 23143 - protein, 94 aa, Homo sapiens
VASGFTVISNYMSWVRQPPGKGLEWVTMIYSGGDTYYTDSVKGRFTISRDTSKNTLYLQMNSLRAEDTAVYYCARWTGTFYDYWGQGTLVTVSS

SEQ ID NO: 23144 - protein, 96 aa, Homo sapiens
AASGFSFRNYGMHWVRQAPGKGLEWVAVIRYDGSSKYYADSVKGRFTISRDNSKNTLDLQMNSLRAEDTAVYYCTRDISSRYFDYWGQGTPVTVSS

SEQ ID NO: 23145 - protein, 96 aa, Homo sapiens
AASGFTFSNYGMHWVRQAPGKGLEWVAVIWYDGSNKYYADSVKGRFTISRDNSKNTLNLQMNSLRAEDTAVYYCTRDISSRYFDYWGQGTLVTVSS

SEQ ID NO: 23146 - protein, 97 aa, Homo sapiens
TVSGGSITSGNYFWGWIRQSPEKGLEWIGSIHYNGNTYYNPSLKSRVTIFRDTSRNQFSLRLTSVTAADTAVYYCVRDGGNWLIDYWGQGTLVTVSS

SEQ ID NO: 23147 - protein, 97 aa, Homo sapiens
TVSGGSITSSGYFWGWVRQPPGKGLEWIGSIVHTGSTYYNPSLMSRLTILVDTSKNQFSLWLSSVTAADTAVYYCVRDGGNWLIDYWGQGTLVTVSS

SEQ ID NO: 23148 - protein, 94 aa, Homo sapiens
AASGFTFSYYWMSWVRQAPGKGLEWVANIKQDGSEKHYVDSVKGRFTISRDNAKNSLYLQMSSLRAEDTAVYYCARALMTTAYWGQGTPVTVSS

SEQ ID NO: 23149 - protein, 94 aa, Homo sapiens
AASGFTFSNYWMSWVRQAPGKGLEWVANIKQDGSETYYVDSVKGRFTISRDNAKNSLYLQMNSLRAEDTAVYYCARALMTTAYWGQGTLVTVSS

SEQ ID NO: 23150 - protein, 94 aa, Homo sapiens
AASGFTFSYYWMSWVRQAPGKGLEWVANIKQDGSEKYYVDSVKGRFTISRDNAKNSLYLQMNSLRAEDTAVYYCARALMTTAYWGQGTLVTVSS

SEQ ID NO: 23151 - protein, 92 aa, Homo sapiens
AASGLTLSNYGMHWVRQAPGKGLEWVGFIDRKNIWYANSVKGRFTISRDTSKNTMYLEMNSLRPEDTAVYYCTKESNSFDVWGLGTMVAVSS

SEQ ID NO: 23152 - protein, 94 aa, Homo sapiens
AASGFTFSSYHMHWARQAPGKGLEWVALIWYDGSKEYYADSLKGRFTISRDNSRNTLYLQMDSLRTEDTGVYYCTKESNSFDVWGQGTMVTVSS

SEQ ID NO: 23153 - protein, 95 aa, Homo sapiens
AASGFTFSSYWMGWVRQAPGRGLEWVANIKEDGSEKYYVDSVRGRFTISKDNAKTSLYLEMNSLRAEDTAVYYCARLPWFSSDYWGQGTLVTVSS

SEQ ID NO: 23154 - protein, 95 aa, Homo sapiens
AASGFTFSTYWMGWVRQAPEKGLEWVANINQDGSEKYYVDSVKGRFTISRDNAKNSLYLQMNSLRAEDTAVYYCARLPWFSSDYWGRGTRVIVFS

SEQ ID NO: 23155 - protein, 93 aa, Homo sapiens
AASGFKFSIYWMNWVRQAPGKGLEWVAKINMGGGEKYYVDSVKGRFTISRDNTKNSLDLQMNSLRVEDTAVYYCVKGGWLDNWGQGTLVTVSS

SEQ ID NO: 23156 - protein, 93 aa, Homo sapiens
AASGFTFSNYWMNWVRQAPGKGLEWVANINEDGSERHYVDSVKGRFTISRDNAKNSLYLQMNSLRAEDTAVYYCVKGGWLDNWGQGTLVTVSS

SEQ ID NO: 23157 - protein, 92 aa, Homo sapiens
AASGFTFSTYWMTWVRQAPGKGLEWVAYIKEDGKEYYVDSVKGRFTISRDNAKTSLHLQMNSLRVEDTALYYCVKGGWLDNWGQGTLVTVSS

SEQ ID NO: 23158 - protein, 91 aa, Homo sapiens
AASGFTFSNSWMDWVRQAPGTGLEWVANIKADGSEIYYLDAVKGRFTISRDNAKNILYLHLGSLRAEDTAVYFCSWTLAYFGQGTPVTVSS

SEQ ID NO: 23159 - protein, 91 aa, Homo sapiens
AASGFTFSDSWMDWVRQAPGTGLEWVANIKADGSETSYVDSVKGRFTISRDNAKNTLFLHLGSLRAEDTAVYFCSWTLAYLGQGTPVTVSS

SEQ ID NO: 23160 - protein, 90 aa, Homo sapiens
ASGFTFSNSWMDWVRQAPGKGLEWVANIKPDGSETSYVDSVKGRFTISRDNARNSLFLQLNSLRVEDTSIYYCSWTLAYLGHGTLVTVSS

SEQ ID NO: 23161 - protein, 90 aa, Homo sapiens
ASGFAFSNSWMDWVRQAPGKGLEWVANIKPDGSETSYVDSVKGRFTISRDNARNSLFLQLNSLRVEDTSIYYCSWTLAYLGRGTLVTVSS

SEQ ID NO: 23162 - protein, 90 aa, Homo sapiens; identical to SEQ ID NO: 23160

SEQ ID NO: 23163 - protein, 91 aa, Homo sapiens
AASGFMFGSYWMHWVRQVPGKGLVWLSRVNNDGTMLTYADSVKGRFTISRDNSKNTVYLQMHSLRAEDTAVYYCVRGVGDYWGQGTLVTVS

SEQ ID NO: 23164 - protein, 92 aa, Homo sapiens
AASGFSFRSYWMHWVRQVPGKGLMWVSRVNADGSLITYADSVKGRFTISRDNVKSTLYLQMSSLRTEDTAVYFCVRGVGDYWGQGTPVTVSS

SEQ ID NO: 23165 - protein, 91 aa, Homo sapiens
AASGFTFSDYEMNWVRQAPGKGLEWVSHISASGITIYYVDSVKGRFTISRDNARNSLYLQMNSLRAEDTAIYYCVRDWYNWGQGTLVTVSS

SEQ ID NO: 23166 - protein, 91 aa, Homo sapiens
AASGFTFSSYEMNWVRQAPGKGLEWVSHISSSSSAIYYVDSVKGRFTISRDNAKNSLYLQMNSLRVEDTAVYYCVRDWYNWGQGTLVTVSS

SEQ ID NO: 23167 - protein, 96 aa, Homo sapiens
AASGFTFSSYAMSWVRQAPGKGLEWVSAISGSGGSTYYADSVKGRFTISRDNSKNTLYLQMNSLRAEDTAVYYCAKGGYSSPYDYWGQGTLVTVSS

SEQ ID NO: 23168 - protein, 96 aa, Homo sapiens
AASGFTFSTYAMSWVRQAPGKGLEWVSTISGSGYSTYYTDSVQGRFTISRDNSKSTLYLQMDSLRAEDTAVYYCAKGGYSSPYDYWGQGTLVTVSS

SEQ ID NO: 23169 - protein, 93 aa, Homo sapiens
VSGLTFSSYNMNWVRQVPGKGLEWVSSISQTSTYMSYIETVKGRFTISRDNAKNSLYLQMNSLRVEDTAVYYCAKGGSYFDYWGQGALVTVSS

SEQ ID NO: 23170 - protein, 93 aa, Homo sapiens
VSGFNLSSYNMNWVRQVPGKGLEWVSSISQTSIYMSYIETVKGRFTISRDNAKNSLYLQMNSLRVEDTAVYYCAKGGSYFDYWGQGALVTVSS

SEQ ID NO: 23171 - protein, 93 aa, Homo sapiens
VSGLTFSSYNMNWVRQVPGKGLEWVASISQTSTYMSYVETVKGRFTISRDNAKNSLYLQMNSLRVEDTAVYYCAKGGSYFDYWGQGALVTVSS

SEQ ID NO: 23172 - protein, 94 aa, Homo sapiens
AVSGFTFSDYNMNWVRQAPGKGPEWVASISRGSVYLSYADSVKGRFTISRDNAKNSLYLQMNSLRVEDTAVYYCAKGGSYFDYWGQGTLVTVSS

SEQ ID NO: 23173 - protein, 93 aa, Homo sapiens; identical to SEQ ID NO: 23170

SEQ ID NO: 23174 - protein, 98 aa, Homo sapiens
AASGLTFSTYWMSWVRQAPGKGLEWLANIKQDGSEKYYVDSVKGRFTISRDNAKNSLFLQMNSLRAEDTAVYYCARVGISVAATLWYWGQGTLVIVSS

SEQ ID NO: 23175 - protein, 98 aa, Homo sapiens
VASGLTVSTYWMSWVRQAPGKGLEWVANIKQDGSEKYYVDSVKGRFTISRDNAKNSVYLQMNSLRVEDTAVYFCARVGISVAATLWYWGQGILVTVSS

SEQ ID NO: 23176 - protein, 94 aa, Homo sapiens
AASGLTFSSYWMHWVRQAPGKGLVWVSRIKSDGSSTSYADSVKGRFTISRDNAKNTLYLQMNSLRAEDTAVYYCARVITYFDYWGQGTLVTVSS

SEQ ID NO: 23177 - protein, 94 aa, Homo sapiens
AASGFDFSSSWMHWVRQAPGKGLVWVSRINTDGAETNYADSVKGRFTISRDNAKNTLFLQMNTLRDEDTAVYYCARVITYFDYWGQGALVTVSS

SEQ ID NO: 23178 - protein, 95 aa, Homo sapiens
AASGFTFSNYWMTWVRQTPGKGLEWVANINPDGSAKQYLDSVKGRFTISRDNGKNSLYLQMNSLRAEDTAVYYCARPPGRALDFWGQGTMVTVSS

SEQ ID NO: 23179 - protein, 95 aa, Homo sapiens
AVSGFDFSNYWMTWVRQVPGKGLEWVANINEGGNVQQYLDSVKGRFTISRDNAKNSLYLQMDSLRAEDTALYYCARPPGRALDFWGQGTMVTVSS

SEQ ID NO: 23180 - protein, 109 aa, Homo sapiens
AASGFTFSSYGMHWVRQAPGTGLEWVAVIWSDGSNKYFADSVKGRFTISRDNSKNTLYLQMHSLRAEDTAVYYCARDGPACSTTSCYRVSYYYYGMDVWGQGTTVTVSS

SEQ ID NO: 23181 - protein, 109 aa, Homo sapiens; identical to SEQ ID NO: 23180

SEQ ID NO: 23182 - protein, 109 aa, Homo sapiens
AASGFTFSSYGMHWVRQAPGKGLEWVAVIWSDGSNKYFGDSVKGRFTISRDNSKNTLYLQMHSLRAEDTAVYYCARDGPACSTTSCYRVSYYYYGMDVWGQGTTVTVSS

SEQ ID NO: 23183 - protein, 96 aa, Homo sapiens
ASGYTFTSYHMHWVRQAPGQGLEWIGIIKSSGDTTIYAQKFQGRVTMTRDTSTSTVYMELNSLRSEDTAVYSCARELPGSFHFDYWGQGTLVTVSS

SEQ ID NO: 23184 - protein, 96 aa, Homo sapiens
ASGYTFTSYHIHWMRQAPGQGPEWMGIIFSSSGSAVSPQKFQGRVTMTRDTSTSVGYMELSGLKSEDTAVYYCARELPGSFHFDYWGQGTLVTVAS

SEQ ID NO: 23185 - protein, 96 aa, Homo sapiens
ASGYTFTSYHMHWVRQAPGQGPEWMGIIFSSSGSAMSPQKFQGRVTMTRDTSTSIAYMELSSLGSEDTAVYYCARELPGSFHFDYWGQGTLVTVAS

SEQ ID NO: 23186 - protein, 93 aa, Homo sapiens
AASTFTFSSYWMSWVRQAPGKGLEWVANINPDGNKKYYVDSVKGRFTISRDNAKNSLSLQMNSLATEDTAVYYCAAWGGSNYWGQGTPVTVSS

SEQ ID NO: 23187 - protein, 93 aa, Homo sapiens
AGSGFTFSEYWMNWVRQAPGQGLEWVANINPDGSQKSYVESVKGRFTISRDNAKNSLYLQMDSLRVEDTSVYYCAAWGGSNYWGQGTLVTVSS

SEQ ID NO: 23188 - protein, 94 aa, Homo sapiens
ASGYTFTGNNMHWVRQAPGQGLEWMGRIISNSGATNYAQKFQGRVTMTRDTSISTAYMELNGLTSDDTAVYYCARGHNYAHDFWGQGTLVTVSS

SEQ ID NO: 23189 - protein, 94 aa, Homo sapiens
ASGYTSTAYPLHWVRQAPGQGLEWMGRISPNSGGSNFAQKFQGRVTLTRDTSINTVYMELSSLRSDDTAVYYCARGHNYAHDFWGQGTLVTVSS

SEQ ID NO: 23190 - protein, 94 aa, Homo sapiens
AASGFTFSSYSMNWVRQAPGKGLEWVSSIGISSSYIYYADSVKGRFTISRDNAKNSLYLQMNSLRAGDTAVYYCAREGAGLDYWGQGTLVTVSS

SEQ ID NO: 23191 - protein, 92 aa, Homo sapiens
AASGFTFSTYSMSWVRQAPGKGLEWVSSISPTSSNIYYAHSVRGRFTISRDKTSLYLQMNSLRAEDTAVYYCAREGAGLDYWGQGTLAIVSS

SEQ ID NO: 23192 - protein, 97 aa, Homo sapiens
AASGFSFRPYAMHWVRQAPGKGLEWVAFIWHDGSNQDYAESLKGRFIISRDNSKNTVYLHMNSLRVDDTAVYYCGRDPPQSGYAIDYWGQGTLVTVS

SEQ ID NO: 23193 - protein, 97 aa, Homo sapiens
AAPGFSFRPYAMHWVRQAPGKGLEWVAFIWHDGSNQDYAESLKGRFIISRDNSKNTVYLHMNSLRVDDTAVYYCGRDPPQSGYAIDYWGQGTLVTVS

SEQ ID NO: 23194 - protein, 97 aa, Homo sapiens; identical to SEQ ID NO: 23192

SEQ ID NO: 23195 - protein, 95 aa, Homo sapiens
TVSGGSISSYYWSWIRQPPGKGLEWIGYIYYSGSTNYNPSLKSRVTISVDTSKNQFSLKLSSVTAADTAVYYCARLDYGGNPDYWGQGTLVTVSS

SEQ ID NO: 23196 - protein, 95 aa, Homo sapiens; identical to SEQ ID NO: 23195

SEQ ID NO: 23197 - protein, 95 aa, Homo sapiens
TVSGGSISTYYWSWIRQPPGKGLEWIGYIYFTGSTSYNPSLKSRVTISVDTSKNQFSLKLNSVTAADTAVYYCARLDYGGNPDYWGQGTLVTVSS

SEQ ID NO: 23198 - protein, 97 aa, Homo sapiens
ISGDSVSSNSAAWNWIRQSPSRGLEWLGRTYYRSKWYNEYAVSVKSRITINPDTSKNLFSLQLNSVTPEDTAVYYCARAVSGRIDYWGPGTLVTVSS

SEQ ID NO: 23199 - protein, 97 aa, Homo sapiens
ISGDSVSSNSATWNWIRQSPSRGLEWLGRTYYRSKWSTDYAGSVKGRITINPDTSKNQFSLQLDSVTPEDTAVYSCARAVSGRIDYWGQGTQVTVSS

SEQ ID NO: 23200 - protein, 97 aa, Homo sapiens; identical to SEQ ID NO: 23199

SEQ ID NO: 23201 - protein, 92 aa, Homo sapiens
AASGFTFSSYWMTWVRQAPGKGLEWVANIKQDGTETYYVDSVKGRFTISRDNAKNSLHLQLDSLRDEDTAVYYCARSYGDYWGQGTLVAVSS

SEQ ID NO: 23202 - protein, 92 aa, Homo sapiens
AASGFDFINSWMTWFRQTPARGLEWVANLNTDGSQRYYVDSVKGRFTISRDNVDNSLYLQMNSLTTEDTAVYYCARSYGDYWGQGTLVTVSS

SEQ ID NO: 23203 - protein, 92 aa, Homo sapiens
AASGFDFINSWMTWVRQTPARGLEWVANLNPDGSQKYYVDSVKGRFTISRDNVEKSLYLQMNSLTTEDTAVYYCARSYGDYWGQGTLVTVSS

SEQ ID NO: 23204 - protein, 100 aa, Homo sapiens
AVYGGSFSDFYWSWIRQPPGKGLEWIGEINHSGITTCNPSLKSRVTISADASKNQFSLKLISVTAADTAVYYCARGWGYSGFGNHAFDIWGQGTRVTVSS

SEQ ID NO: 23205 - protein, 100 aa, Homo sapiens
AVYGGSFSDFYWSWIRQPPGKGLEWIGEINHSGSTTCNPSLKSRVTISADASKNQFSLKLISVTAADTAVYYCARGWGYSGFGNHAFDIWGQGRRVTVSS

SEQ ID NO: 23206 - protein, 100 aa, Homo sapiens; identical to SEQ ID NO: 23204

SEQ ID NO: 23207 - protein, 100 aa, Homo sapiens; identical to SEQ ID NO: 23205

SEQ ID NO: 23208 - protein, 99 aa, Homo sapiens
ASGYTFTDFGISWVRQAPGQGLEWMGWINTSNPNTHIHYEQKFQDRVTMTIDTSTNSAYLEVTTLRSDDTAVYYCARDWDGRTNWFDPWGQGTLVTVSS

SEQ ID NO: 23209 - protein, 97 aa, Homo sapiens
ASGYTFSSYGISWVRQAPGQGLEWMGWIGSYNDDTAYAQKFQGRVTMTTDTSTSTAYMELRSLRSDDTAVYYCARDWDGRTNWFDPWGQGTLVTVSS

SEQ ID NO: 23210 - protein, 97 aa, Homo sapiens; identical to SEQ ID NO: 23209

SEQ ID NO: 23211 - protein, 93 aa, Homo sapiens
ASGFTFSTQGMSWVRQAPGKGLEWVSGIPGGSTNAYYADSVRGRFTSSRDNPKSTFYLQMNSLRVEDTGIYYCARGTASPDSWGQGTPVTVSS

SEQ ID NO: 23212 - protein, 94 aa, Homo sapiens
AASGFTFSPSGMSWVRQAPGKGLEWVSGMPGGGTSTFYADSVKGRFTISRDNSKNTLYLQMNSLRADDTARYYCARGTASPDSWGQGTLVTVSS

SEQ ID NO: 23213 - protein, 90 aa, Homo sapiens
AASGFTFSASWMSWVRQAPGKGLEWVANIRYDGSQKEYADSVKGRFTISRDNTKNSLYLQMNSLRVEDTALYYCAREYRWGQGTQVTVSS

SEQ ID NO: 23214 - protein, 90 aa, Homo sapiens
AASGFTLGSHWMSWVRQTPGKGLEFVANINQDGSEKYYLDSVKGRFSISRDNAKNSLFLQMGSLRADDTAIYYCAREYRWGQGTLVTVSS

SEQ ID NO: 23215 - protein, 93 aa, Homo sapiens
AASGFTFSSHWMQWVRQAPGKGLVWVSRINSDGSGSDSAGFAKGRFTVSRDNAKNTLYLQMSSLRAEDTAMYYCVRDSSASHWGQGSLVTVSS

SEQ ID NO: 23216 - protein, 93 aa, Homo sapiens
AASGFTFKDHWMYWVRQTPGKGLMGVSHINSDGTYANYADSVKGRFTISRDNARNTLFLQMNSLTVEDTAVYFCVRDSSASHWGRGTLVTVSS

SEQ ID NO: 23217 - protein, 93 aa, Homo sapiens; identical to SEQ ID NO: 23216

SEQ ID NO: 23218 - protein, 94 aa, Homo sapiens
AASGFTFSDYYMSWIRQAPGKGLEYVSYISGSGTIINYAESVKGRFTISRDNAKNSLYLEMNSLRAEDTAVYYCAREARTPTYWGQGTVVTVSS

SEQ ID NO: 23219 - protein, 94 aa, Homo sapiens
AASGFTFTNYYMTWIRQAPGRGLEYILYISGSGSIISYADSVKGRFTISRDNAKNSLYLQMNSLRADDTAVYYCAREARTPTYWGQGTLVTVSS

SEQ ID NO: 23220 - protein, 97 aa, Homo sapiens
ISGDSVSSNGVSWHWIRQSPSRGLEWLGLTYYSSGWHTVYALSVQSRITINPDTSKNQFSLQLTSLTPEDTAVYYCARNHLWAIAFWGQGTRVTVSS

SEQ ID NO: 23221 - protein, 97 aa, Homo sapiens
ISGDSVSSNGVSWHWIRQSPSRGLEWLGLTYYSSGWHSDYAVSVQSRITINPDTSKNQFSLQLSSLTPEDTAVYYCARNHLWAIAFWGQGTRVTVSS

SEQ ID NO: 23222 - protein, 96 aa, Homo sapiens
AASGFTLSNYWMSWVRQAPGKGLEWVANINEHGSEKFYVDSVKGRFTISRDNAKNSLFLQMNTLRGEDTAVYYCARAAGPGTCDYWGQGTLVTVSS

SEQ ID NO: 23223 - protein, 96 aa, Homo sapiens
AASGFTFGSYWMSWVRQAPGKGLEWVANIDQDGSEQYYVDSVKGRFTISRDNAKNSLYLQMHTLRAEDTAVYYCARAAGPGTCDYWGQGTLVTVSS

SEQ ID NO: 23224 - protein, 93 aa, Homo sapiens
ASGYTFTNNRIHWMRQAPGQGLEWMGWINPNSGGTDYAQNFQGRVTMTRDTSISTVYMELSTVRYDDTAVYYCARENWYFDYWGQGTLVTVSS

SEQ ID NO: 23225 - protein, 93 aa, Homo sapiens
ASGYTFTGYWIHWVRQAPGQGLEWLGCLNYNNGNTGYAQKFQGRVSMTRDTSITTAYMELSSLRSDDTAVYFCARENWYFDYWGQGTLVTVSS

SEQ ID NO: 23226 - protein, 92 aa, Homo sapiens
AASGFTFSSYWMHWVRQAPGKGLVWVSRINSDGTSTSYADSVKGRFTISRDNAKNTLFLQMNSLRAEDTAVYYCVVEAWDYWGQGTLVTVSS

SEQ ID NO: 23227 - protein, 92 aa, Homo sapiens
AASGFTFSNYWMHWVRQAPGKGLVWVSRINSDGNSTSCADSVKGRFSISRDNAKNTLYLQMNSLRAEDTAIYYCVVEAWDYWGQGTLVTVSS

SEQ ID NO: 23228 - protein, 92 aa, Homo sapiens
AASGFTFSDYWMHWVRQVPGKGLVWVSRINSDGSSPNYADSVKGRFTISRDNAKNTLYLQMDSLRAEDTAVYYCVVEAWDYWGQGTLVTVSS

SEQ ID NO: 23229 - protein, 92 aa, Homo sapiens
AASGFTFSDYWMHWVRQAPGKGLVYVSRINSDGSSPNYADSVKGRFTISRDNAKNTVYLQMDNLRVEDTAVYYCVVEAWDYWGQGTLVTVSS

SEQ ID NO: 23230 - protein, 96 aa, Homo sapiens
AASGFTFSGHAMHWVRQAPGKGLEWVTLISYDGRTKLYAETVKGRFTVSRDNSKNTLYLQMDSLRVDDTAVYYCVAEVGAREFDSWGQGTLVTVSS

SEQ ID NO: 23231 - protein, 96 aa, Homo sapiens
AASGFPFSSHAMHWVRQAPGKGLEWVAVISYDGNYKYYTDSLKGRFTISRDNSNNTLFLQMDSLRAEDTALYYCVAEVGAREFDSWGQGTLVTVSS

SEQ ID NO: 23232 - protein, 95 aa, Homo sapiens
AASGFTFSTYGMSWVRQAPGKGLEWVSSITNNGGSTFYADSVKGRFTISRDNSKNTLSLQMNSLRAEDTALYYCARLGPYYSDYWGQGTLVTVSS

SEQ ID NO: 23233 - protein, 94 aa, Homo sapiens
ASGFTFSIYGMNWVRQSPGRGLEWVSDISASGDDTYYADSVKGRFTVSRDNSKNTLYLQMNSLRAEDTAVYYCARLGPYYSDYWGQGSLVTVSS

SEQ ID NO: 23234 - protein, 93 aa, Homo sapiens
TVSGGSISNYYWSWIRQPPGKGLEWIGCIYYNGITNYTPSLKSRLTISVDTSKNQFSLKLTSVTAADTAVYFCARTYNYMDVWGKGTTVTVSS

SEQ ID NO: 23235 - protein, 93 aa, Homo sapiens
TVSGGSINKYYWSWIRQPPGKGLEWIGCIYYNGITNYTPSLKSRLTISVDTSKNQFSLKLTSVTAADTAVYFCARTYNYMDVWGKGTTVTVSS

SEQ ID NO: 23236 - protein, 93 aa, Homo sapiens
TVSSGSISNYYWSWIRQPPGKGLEWIGSVYYSGGTNHNPSLKSRVAVSVDTSKNQFSLKLSSVTAADTAVYYCARTYNYMDVWGKGTTVTVSS

SEQ ID NO: 23237 - protein, 93 aa, Homo sapiens
TVSDASISNYYWSWIRQPPGKGLEWVGCIYYSGNTNYNPSLKSRVTISVDTAKNQFSLKLSSVTAADTAVYYCARTYNYMDVWGKGTTVTVSS

SEQ ID NO: 23238 - protein, 90 aa, Homo sapiens
EVSGFPFRDYGMHWVRQAPGKGLEWVAVIWSDGSNKYYADSVKGRFTISRDNSKSTLYLQMNSLRVEDTAVYYCSSLHYWGQGTLVTVSS

SEQ ID NO: 23239 - protein, 90 aa, Homo sapiens
AASGFIFHDYGMHWVRQAPGKGLEWVAVIWSDGSNKYYADSVRGRFTVSRDNSEKTVYLQMNSLRVEDTAIYYCSSLHYWGQGTLVSVSS

SEQ ID NO: 23240 - protein, 90 aa, Homo sapiens
AASGFIFHDYGMHWVRQAPGKGLEWVAVIWSDGSNKYYADSVRGRFTVSRDNSEKTVYLQMNSLRVEDTAIYYCSSLHYWGQGTLVPVSS

SEQ ID NO: 23241 - protein, 90 aa, Homo sapiens
AASGFTFSSYAMHWVRQAPGKGLEWVAVIWSDGSNKYYADSVRGRFTVSRDNSEKTVYLQMNSLRVEDTAIYYCSSLHYWGQGTLVSVSS

SEQ ID NO: 23242 - protein, 96 aa, Homo sapiens
AASGFTLNNYWMHWVRQAPGKGLVWVSRIDEGGSSTTYADSVKGRFTISRDNAKNTLYLQMNSLRVEDTAVYYCVRDLPHNWFDPWGQGTLVTVSS

SEQ ID NO: 23243 - protein, 96 aa, Homo sapiens
AASGFSISSYWMHWVRQAPGKGLVWVSRVNNDGSDSTYADSVKGRFTISRDNAKNTLYLQMNSLRAEDTAVYYCVRDLPHNWFDPWGQGTLVAVSS

SEQ ID NO: 23244 - protein, 94 aa, Homo sapiens
SGFIFNNYWMHWVRQAPGKGLVWVSGINNDGSGTKYADSVKGRFSISRDNAKNTLFLQMNSLRAGDTAVYYCVRDLPHNWFDPWGQGTLVTVSS

SEQ ID NO: 23245 - protein, 94 aa, Homo sapiens
SGFNFNEYWMHWVRQAPGKGLVWVSGINNDGSGTKYADSVKGRFTISRDNAKNTLFLQMNSLRAGDTAVYYCVRDLPHNWFDPWGQGILVTVSS

SEQ ID NO: 23246 - protein, 96 aa, Homo sapiens
ASGFTFSDYAMSWVRQAPGKGLEWVSVITGDDVNTAYGDSVKDRFATSRDNSENTVFLQMNNLRTEDTGMYYCAKTGGVTWAFDYWGQGTLVSVSS

SEQ ID NO: 23247 - protein, 97 aa, Homo sapiens
AASGFTFSDYAMAWVRQAPGKGLEWVSIIVGTATSTFYADSVNGRSTISRDNFKNTLYLQMDSLRAEDTAVYYCAKTGGVTWAFDYWGQGTLVTVSS

SEQ ID NO: 23248 - protein, 94 aa, Homo sapiens
AASGFIFSHAWMSWVRQAPEKGLEWVGHIKSKADGGTTDYAAPVKGRFTISRDDSKNTLYLQINSLKTEDTAVYYCATAGFSNWGQGTLVTVSS

SEQ ID NO: 23249 - protein, 94 aa, Homo sapiens
VASGFTLSNAWMSWVRQAPGKGLEWVGRIKSKTDGGTTDYAAPMKGTFTISREDSKNTLYLQMNSLKAEDTAVYYCATAGFSNWGQGTLVTVSS

SEQ ID NO: 23250 - protein, 94 aa, Homo sapiens
AASGFTLSNYGMSWVRQAPGEGLECVSFIDRSGTYYADSVKGRFTISRDNSKNTLYLQMNSLRVADTAVYYCAKLVGNNPFDHWGQGTLVTVSS

SEQ ID NO: 23251 - protein, 96 aa, Homo sapiens
AASGFTFTNYAMAWVRQPPGKGLEWVSTVVVSDGRTFYADSVKGRFTISRDSSKSTLFLQMNSLRADDTAVYYCAKLVGNNPFDHWGQGTLVTVSS

SEQ ID NO: 23252 - protein, 96 aa, Homo sapiens
AASGFTFSGYWMHWVRQAPGKGLVWVSRISSDGSRTSYADSVKGRFTISRDNAKNTLYLQMNSLRAEDTAVYYCARIRSGTYFDYWGQGTLVTVSS

SEQ ID NO: 23253 - protein, 96 aa, Homo sapiens
AASGFTFSSSWMHWVRQAPGKGLVWVSRIDSDGSSTTYADSVKGRFTISRDNAKNTLFLQMNSLRVQDTAVYYCARIRSGTYFDYWGQGTLVTVSS

SEQ ID NO: 23254 - protein, 101 aa, Homo sapiens
AASGFTFSNYAMSWVRQAPGKGLEWVSSITGSGGNTYYADSVEGRFTISRDNSKNTLYLQINSLRVEDTAVYFCAKVWHSDGWYAGPFDYWGQGALVTVSS

SEQ ID NO: 23255 - protein, 101 aa, Homo sapiens
AASGFTFSSHGMDWVRQAPGRGLEWVSGISGSGDKTYYAEFVKGRFTVSRDNSKNTLYLQINSLRVEDTAVYFCAKVWHSDGWYAGPFDYWGQGALVTVSS

SEQ ID NO: 23256 - protein, 101 aa, Homo sapiens; identical to SEQ ID NO: 23255

SEQ ID NO: 23257 - protein, 101 aa, Homo sapiens; identical to SEQ ID NO: 23255

SEQ ID NO: 23258 - protein, 101 aa, Homo sapiens; identical to SEQ ID NO: 23255

SEQ ID NO: 23259 - protein, 103 aa, Homo sapiens
AASGFTFSSYAMSWVRQAPGKGLEWVSAIRGRGSSTFYADSVKGRFTISRDNSKNTLYLQMNSLRAEDTAVYYCAKRGDFWSGLYYYYYMDVWGKGTTVTVSS

SEQ ID NO: 23260 - protein, 103 aa, Homo sapiens
AASGFTFGTYAMSWVRQAPGKGLEWVSGIRGSGGSTYYADSVKGRFTISRDNSKNMLYLQMNSLRAEDTAVYYCAKRGDFWSGLYYYYYMDVWGKGTTVTVSS

SEQ ID NO: 23261 - protein, 97 aa, Homo sapiens
VASGFTFSSYAMNWVRQAPGKGLEWVSGISGNGGDTYYADSAKGRFTISRDNSKNTLFLQMYSLRADDTALYYCASSGYDSDYFDYWGQGTRVTVSS

SEQ ID NO: 23262 - protein, 97 aa, Homo sapiens
AASGFTFRSYTMSWVRQAPGKGLEWVSAISGSGSSTYYADSVKGRFTISRDNSKNTLFLQMNSLRAEDTAVYYCASSGYDSDYFDYWGQGTLVTVSS

SEQ ID NO: 23263 - protein, 96 aa, Homo sapiens
AASGFTFSSYEMNWVRQSPGKGLEWVSYISSSGTSIKYADSVKGRFTISRDNAKSSLFLQMNSLRAEDTATYYCARDDYADNFDYWGQGTLVTVSS

SEQ ID NO: 23264 - protein, 96 aa, Homo sapiens
AASGFTFSSYEMNWVRQAPGKGLEWVSYISSSGNSIKYADSVKGRFTISRDNAKSSLFLQMNSLRAEDTAIYYCARDDYADNFDYWGQGTLVTVSS

SEQ ID NO: 23265 - protein, 95 aa, Homo sapiens
ASGFTFRDYEMNWVRQAPGKGLEWVSYIGRSGESIFYADSVEGRFTISRDNAKDSLYLQMNSLRAEDTAVYYCARDDYADNFDYWGRGTLVTVSS

SEQ ID NO: 23266 - protein, 96 aa, Homo sapiens
TVSGGSINNYYWSWIRQPPGKGLEWIGYIYYSGSTNYNPSLKSRVTISVDTSKSQFSLKLSSVTAADTAVYYCARHYGQQLPPGYWGQGTLVTVSS

SEQ ID NO: 23267 - protein, 96 aa, Homo sapiens
TVSGGSITSHYWSWIRQPPGKGLEWIGYIYYSGSANYNPSLKSRVTISLDASENQFSLKLSSVTAADTAVYYCARHYGQQLPPGYWGQGILVTVSS

SEQ ID NO: 23268 - protein, 93 aa, Homo sapiens
GSGITLSNYWMTWVRQAPGRGLECLANIKTDGSEKYYADSVKGRFSISRDNAKNSLYLQLSSLGVEDTGIYYCATDLNWSATWGQGTLVTVSS

SEQ ID NO: 23269 - protein, 94 aa, Homo sapiens
AASGFTFSDNFMTWVRQAPGRGLEWVANINPVGTETFYVDSVKGRFTISRDNAKNSLFLQMNSLRAEDTALYYCATDLNWSATWGQGTLVTVSS

SEQ ID NO: 23270 - protein, 93 aa, Homo sapiens
AASGITFKNVWISWVRQAPGKGLEWVGRISSESHGGTTDYAAPVKGRFIISRDDSKNTLYLQMNSLKTEDTAVYYCLGRFDPWGQGTLVTVSS

SEQ ID NO: 23271 - protein, 93 aa, Homo sapiens
AASGFTLKNAWVSWVRQAPGKGLEWVGRIRSKTDGGTTDYAVPVKGRFTISRDDAKNTLYLQMDSLKTEDTAVYYCLGRFDPWGQGTLVTVSS

SEQ ID NO: 23272 - protein, 100 aa, Homo sapiens
AASGLNFSNSWMSWVRQAPGKGLEWVANIKKDGSEKNYLDSVKGRFTISRDNAKNSVYLQMNSLRAEDTAVYYCATGYSSIWHPYYFDCWGQGTLVTVSS

SEQ ID NO: 23273 - protein, 100 aa, Homo sapiens
AASGFTFSNSWMSWVRQAPGKGLEWVANIKRDGSEKNYVGSVKGRFTISRDNAENLLYLEMNSLRTEDTALYYCATGYSSIWHPYYFDCWGQGTPVIVSS

SEQ ID NO: 23274 - protein, 95 aa, Homo sapiens
AASGFPFSDYSMNWVRQAPGKGLEWVSYIRTSSSAVSYADSVKGRFTISKDNAKNSLYLQMNSLRDEDTAVYYCVRDYIYGFDYWGQGTQVTVSS

SEQ ID NO: 23275 - protein, 95 aa, Homo sapiens
AASGFTFNSYSMNWVRQAPGKGLEWVSYVGISSSTIHYADSVKGRFTISRDNAKNSLFLQMNSLRAEDTAVYYCVRDYIYGFDYWGQGTLVTVSS

SEQ ID NO: 23276 - protein, 94 aa, Homo sapiens
AASGFTFRTYSMTWVRQAPGKGLEWVATINEDGGQTYYVDSVKGRFTISRDNAKNSLYLQMNSLRAEDTAVYYCATRGGAPANWGQGTLVTVSS

SEQ ID NO: 23277 - protein, 94 aa, Homo sapiens
AASGFNFSTYYMTWVRQAPGKGLEWVANIKEDGSVQNYVDSVKGRFTISRDNAKSSLYLHMNILRAEDTAIYYCATRGGAPANWGQGTLVTVSS

SEQ ID NO: 23278 - protein, 101 aa, Homo sapiens
TVSGGSMSSDGGDYYWAWIRQTPGTGLEWIANINYSGRTYYRASLKSRVTISGDTSSNQFSLELNSVTAADTAIYYCARQVGNGLWYFDLWGRGTLVTVSS

SEQ ID NO: 23279 - protein, 99 aa, Homo sapiens
TVSGGSISSSGYYWGWIRQPPGKGLEWIGSIYYSGKTYYNPSLKSRVTISVDTSENQFSLRLTSVTAADTAVYYCARQVGNGLWYFDLWGRGTLVTVSS

SEQ ID NO: 23280 - protein, 94 aa, Homo sapiens
AASGFTFSGYWMHWVRQAPGKGLVWLSSIRGDGDDTAYADFVKGRLTVSRDNAKNTLYLQMDSLRAEDSALYYCAREADGFDVWGQGTMVTVSS

SEQ ID NO: 23281 - protein, 94 aa, Homo sapiens
EASEFTFSDFWMHWVRQVPGKGLVWVSSSRGDGHDSAYADSVKGRFIISRDNAKKTLYLQMNNLRAEDTAVYYCAREADGFDVWGQGTMVTVSS

SEQ ID NO: 23282 - protein, 94 aa, Homo sapiens
EASEFTFSDFWMHWVRQVPGKGLVWVSSSRGDGHDSAYADSVKGRFIISRDNAKKTLYLQMNNLRAEDTAVYYCAREADGFDVLGPRDNGHRFF

SEQ ID NO: 23283 - protein, 99 aa, Homo sapiens
TVSGGSISGYYWTWIRQPPGKGLEWIGYIYSSGSTKHNPSLKSRVTISVDTSKNQFSLKLTSVTAADTAVYYCARKTVAHNWNPGFDYWGQGTLVTVSS

SEQ ID NO: 23284 - protein, 99 aa, Homo sapiens
TVSGGSISGYYWTWIRQPPGKGLEWIGYIYSSGSTKYNPSLKSRVTISVDTSKNQFSLKLTSVTAADTAVYYCARKTVAHNWNPGFDYWGQGTLVTVSS

SEQ ID NO: 23285 - protein, 95 aa, Homo sapiens
AASGFTFINYAMTWVRQAPGKGLEWVSSISDSGYSTYYADSVKGRFSISRDNSKNTLYLQMNSLRAEDTAVYYCAKDEVRRHDYWGQGTLVTVSS

SEQ ID NO: 23286 - protein, 95 aa, Homo sapiens
AASGFTFSSSAMSWVRQAPGKGLEWVSAISTSGDSTHYADSVKGRFTITRDNSKNTLYLQINSLRAEDTAVYYCAKDEVRRHDYWGQGTLVTVSS

SEQ ID NO: 23287 - protein, 95 aa, Homo sapiens
AASGFTFSSSAMSWVRQAPGKGLEWLSAISTSGDSTHYADSVKGRFTITRDNSKNTLYLQINSLRAEDTAVYYCAKDEVRRHDYWGQGTLVTVSS

SEQ ID NO: 23288 - protein, 91 aa, Homo sapiens
AASGFTFSNYWMSWVRQAPGKGLEWVANIKGDGSLEQYLASVKGRFTISRDNAKKSLYLQMNSLRAEDTAVYYCVKEWDHWGQGTLVTVSS

SEQ ID NO: 23289 - protein, 90 aa, Homo sapiens
AYGFMFSSHWMSWVRQAPGKGLEWVANIKQDESEKYYVDSVKGRFTISRDNAKNSLFLQMNSLRVEDTAIYYCVKEWDHWGQGALVTVSS

SEQ ID NO: 23290 - protein, 94 aa, Homo sapiens
KGLGYNFISAWIGWVRQVPGKGLEWMGIIYPRDSDTRYSPSFQGQVTISADESISTAYLQWKSLKASDTAIYYCARRGDYFNSWGQGTLVTVSS

SEQ ID NO: 23291 - protein, 94 aa, Homo sapiens
KGVGYNFNSAWIGWVRQMPGKGLEYIGIIYPRDSDTRYDPSFQVHITISVDQSVNTAYLQWASLQASDTAMYYCARRGDYFNSWGQGTRVTVSS

SEQ ID NO: 23292 - protein, 94 aa, Homo sapiens
KGVGYNFNSAWIGWVRQMPGKGLEYIGIIYPRDSDTRYDPSFQGHITISVDQSVNTAYLQWASLQASDTAMYYCARRGDYFNSWGQGTRVTVSS

SEQ ID NO: 23293 - protein, 94 aa, Homo sapiens
KASGYNFVSAWIGWVRQMPGKGLEWMGIIYPRDSDTRYSPSFQGQVSISVDKSISTAYLQWNSLRASDTAMYYCARRGDYFNSWGQGTLVTVSS

SEQ ID NO: 23294 - protein, 93 aa, Homo sapiens
ASGFTFNSYSMHWVRQVPGKGLVWVSRVNGDGSNGLYADSVKGRFTISRDNAKNTAYLQMNNLRVEDTAVYYCARDRPPFDPWGQGTLVTVSS

SEQ ID NO: 23295 - protein, 94 aa, Homo sapiens
AASGFTFSSSWMHWVRQAPGKGLVWVSVINSDGSTTNYADSVKGRFTISRDNAKNTLYLEMNSLRAEDTAVYYCARDRPPFDPWGQGTLVTVSS

SEQ ID NO: 23296 - protein, 94 aa, Homo sapiens
AASGFTFSSYWMHWVRQAPGKGLVWVSRINIDGSNTGYADTVKGRFTISRDNAKNTLYLQMSSLRVEDTGVYYCARDRPPFDPWGQGTLVTVSS

SEQ ID NO: 23297 - protein, 94 aa, Homo sapiens
ASGFTFSSYWMHWVRQAPGKGLVWVSRINSDGSSTSYADSVKGRFTISRDNAKNTLYLQMNSLRAEDTAVYYCARDGGSGFDPWGQGTLVTVSS

SEQ ID NO: 23298 - protein, 95 aa, Homo sapiens
AASGFTFSSYWMHWVRQAPGKGLVWVSRINSDGRSRNYADSVKGRFTISRDNAKNTLYLQMNSLRAEDTAVYYCARDGGSGFDPWGQGTLVTVSS

SEQ ID NO: 23299 - protein, 93 aa, Homo sapiens
TVSGGSINNYYWSWLRQPPGKELEWIAYIYYNGNTNYNPSLKSRVTISVDTSNNQFSLKLGSLTASDTAVYFCARGGWYFDVWGRGSLVTVSS

SEQ ID NO: 23300 - protein, 93 aa, Homo sapiens
TVSGGSMSSYYWSWIRQPPGKGLEWIAYIYYSGSTNYNPSLQSRVTISVDTSKNQFSLKLSSVTAADTAVYYCARGGWYFDVWGRGTLVTGSS

SEQ ID NO: 23301 - protein, 94 aa, Homo sapiens
KGSGYSFTSYWIGWVRQLPGKGLEWMGIIFPDDSDSRYSPSFQGQVTISADKSISTAFLQWSSLKASDTAMYYCARGSSTFDFWGQGTLVTVSS

SEQ ID NO: 23302 - protein, 94 aa, Homo sapiens
KSSGYSFTNYWIGWVRQMPGKGLEWMGIIYPGGSDTRYSPSFQGQVTISADKSDNTAYLQWSSLKASDTAMYYCARGSSTFDFWGQGTQVTVSS

SEQ ID NO: 23303 - protein, 96 aa, Homo sapiens
TVSGGSISSYYWTWIRQSPGEGLEWIGYISYSGITNYNPSLKSRVTISVDTSENQFSLKLTSVTAADTAVYYCARHRITGTGFDYWGQGTLVTVSS

SEQ ID NO: 23304 - protein, 96 aa, Homo sapiens
TVSGGSISTYYWSWIRQPPGKGLEWIGYISYSGSTNYNPSLKSRVTISVDTSKNQFSLKLSSVTAADTAVYYCARHRITGTGFDYWGQGTLVTVSS

SEQ ID NO: 23305 - protein, 99 aa, Homo sapiens
ASGYTFTNYGISWVRQAPGQGLEWMGWISAYNANTNYAQKLQGRVTMTTDTSTSTAYMELRSLRSDDTAVYYCARDTHYSDSSGYPDYWGQGTLVTVSS

SEQ ID NO: 23306 - protein, 99 aa, Homo sapiens
ASGYSFTNYGISWVRQAPGQGLEWMGWISGYNGNINYAQKLQGRVTMTTDTSTSTAYMELRSLRSDDTAVYYCARDTHYSDSSGYPDYWGQGTLVTVSS

SEQ ID NO: 23307 - protein, 100 aa, Homo sapiens
ISGDSVSSNSVAWNWIRQSPSRGLEWLGRTYYRSTWLNDYAVSVKSRITINPDTSKNQFSLQLNSVTPEDTAVYYCARGDNWNDFDFDHWGQGTLVTVSS

SEQ ID NO: 23308 - protein, 100 aa, Homo sapiens
ISGDSVSSNSVAWHWIRQSPSRGLEWLGRTYYRSSWHTDYAVSVKGRITISPDTAKNQFSLQLNSVTPEDTAVYYCARGDNWNDFDFDHWGQGALVTVSS

SEQ ID NO: 23309 - protein, 93 aa, Homo sapiens
AASGFTFSTFWMTWFRQAPGKGLEWVANIKHDGSKTYYVDSVRGRFTISRDNAKNSLYLQMNSLRADDTAVYFCARGASGGYWGQGTLVTVSS

SEQ ID NO: 23310 - protein, 93 aa, Homo sapiens
AASGFTFSTYWMTWVRQAPGKGLEWVANIKQDGSEKYYVDSVKGRFTISRDNAKNSLYLQMNSLRVEDTAVYYCARGASGGYWGQGILVTVSS

SEQ ID NO: 23311 - protein, 93 aa, Homo sapiens
AASGFTFSDFWMNWVRQAPGKGLEWVAHIKGDGSEKYYVDSVKGRFTISRDNAKNSLYLQMNSLRAEDTAVYYCTIGHYGDYWRQGTLVTVSS

SEQ ID NO: 23312 - protein, 93 aa, Homo sapiens
AASGFTFSRFWMNWVRQAPGKGLEWVANMDPDGNEKYYVDSVKGRFTISRDNAKNSLYLQMNSLRAEDTAVYLCTIGHYGDYKGQGTLVTVSS

SEQ ID NO: 23313 - protein, 93 aa, Homo sapiens
ATSGFTFSGFWMNWVRQAPGKELEWVANIKEDGSEKFYADSVKGRFTVSRDNAKNSLYLQLNSLRAEDTAVYYCTIGHYGDYGGQGTLVTVSS

SEQ ID NO: 23314 - protein, 96 aa, Homo sapiens
VGFGFTPQFSDYSMAWVRQAPGKGLEWVAAITTPTAPFYADFVRGRFTISRDNARNTLFLQMDNLRVEDTATYFCARRVEGNFDYWGRGTLVSVSS

SEQ ID NO: 23315 - protein, 94 aa, Homo sapiens
AASGFSFDIYTMGWVRQAPGKGLGWVSAIVAAGTTSYADSVRGRFTISRDNSKKTIYLQMNSLRAEDTAVYYCARRVEGNFDYWGQGTLVTVSS

SEQ ID NO: 23316 - protein, 94 aa, Homo sapiens
AASGFNFDIYTMGWVRQAPGRGLGWVSAIVAAGTTSYADSVRGRFTISRDNSKKTIYLQMNSLRAEDTAVYYCARRVEGNFDYWGQGTLVTVSS

SEQ ID NO: 23317 - protein, 94 aa, Homo sapiens
AASGFSFDIYTMGWVRQAPGKGLGWVSAIVAAGTTSYADSVRGRFTISRDNSKKTIYLQMDSLRAEDTAVYYCARRVEGNFDYWGQGTLVTVSS

SEQ ID NO: 23318 - protein, 94 aa, Homo sapiens
GASGFNFDDYTMGWVRQAPGKGLEWVSAIISAFSTYYGGSVKGRFTISRDNSKNTLYLQMNSLRTEDTAVYYCARRVEGNFDYWGQGTLVTVSS

SEQ ID NO: 23319 - protein, 94 aa, Homo sapiens
AASGFRFDIYTMGWVRQAPGKGLGWVSAIVSAGTTSYAESVRGRFTISRDNSKKTIYLQMNSLRAEDTALYYCARRVEGNFDYWGQGTLVTVSS

SEQ ID NO: 23320 - protein, 94 aa, Homo sapiens
VASGFNFDLYTMSWVRQAPGKGLDWVSAIISGGSTYYTDSVKGRFTISRDNSKNTLYLQMNSLRAEDTAVYYCARRVEGNFDYWGQGTLVTVSS

SEQ ID NO: 23321 - protein, 94 aa, Homo sapiens
AASGFNFDIYTMGWVRLAPGRGLGWVSAIVAAGTTSYADSVRGRFTISRDNSKKTIYLQMNSLRAEDTAVYYCARRVEGNFDYWGQGTLVTVSS

SEQ ID NO: 23322 - protein, 94 aa, Homo sapiens; identical to SEQ ID NO: 23316

SEQ ID NO: 23323 - protein, 96 aa, Homo sapiens
AASGFTFSRYGMHWVRQTPGKGLEWVAAIWYDGSNKNYADSVKGRFTISRDNPKNTLYLQMNSLRAEDTAVYYCARDYGDYAIDYWGQGTLVTVSS

SEQ ID NO: 23324 - protein, 96 aa, Homo sapiens
AASGFTFSSSGMHWVRQAPGKGLEWVAFILYDGSNKYYADSVKGRFTISRDNSKNTLYLQMNGLRAEDTAVYYCARDYGDYAIDYWGQGTLVTVSS

SEQ ID NO: 23325 - protein, 99 aa, Homo sapiens
TVSGGSISGYYWNWIRQPPGKGLEWIGYMYNSGTTNYNPSLQSRVTISVDTSRNQFFLNLSSLTAADTAVYFCARGRKDATGSYGTDYWGQGTLVTVSS

SEQ ID NO: 23326 - protein, 99 aa, Homo sapiens
TVSGGSISNYYWNWIRQPPGKGLEWIGYIFYSGSTNYSPSLKSRVTISLDTSRNHFSLTFNSVTAADTAVYYCARGRKDATGSYGTDYWGPGTLVTVSS

SEQ ID NO: 23327 - protein, 90 aa, Homo sapiens
AASGFTFSRNWMSWVRQAPEKGLEWVANIKYDGREKYYVDSVKGRFTISRDNAKNSLYLQMDSLRVEDTAIYYCVREWNWGQGTLVTVSS

SEQ ID NO: 23328 - protein, 90 aa, Homo sapiens
GASGFTFTRNWMSWVRQAPGKGPEWVANINPDGSEKYYVDSVKGRFTISRDNAKNSLYLQMNSLRAEDTAIYYCVREWNWGQGTLVTVSS

SEQ ID NO: 23329 - protein, 93 aa, Homo sapiens
AASGFTLNNYWMHWVRQVPGKGLMWVARIKSDGRSTIYADSVKDRFTISRDNGKLFLQMNSLRVEDTAVYFCARDNFGSIDYWGQGTLVTVSS

SEQ ID NO: 23330 - protein, 95 aa, Homo sapiens
VGSGFSFSSYWMHWVRQAPGKGLVGVSHIKPDGSPTDYAESVKGRFTISRDNAKNTLYLQMNSLSPDDTALYYCARDNFGSIDYWGQGTLVTVSS

SEQ ID NO: 23331 - protein, 100 aa, Homo sapiens
KGSGYSFSTYWIGWVRQMPGKGLEWMGIIYPGDSDTRYSPSFQGQVTISADKSINTAYLQWSSLKASDTAIYYCARGVLVGATQNWFDPWGQGTLVTVSS

SEQ ID NO: 23332 - protein, 100 aa, Homo sapiens
KGSGYSFSAYWIGWVRQMPGKGLEWMGIIYPGDSDTRYSPSFQGQVTISADKSIDTAYLQWSSLKASDTAIYYCARGVLVGATQNWFDPWGQGTLVTVSS

SEQ ID NO: 23333 - protein, 100 aa, Homo sapiens; identical to SEQ ID NO: 23331

SEQ ID NO: 23334 - protein, 100 aa, Homo sapiens
KGSGYSFTTYWIGWVRQMPGKGPEWMGIIYPGDSDTRYSPSFQGQVIISADKSISTAYLQWSSLKASDTAIYYCARGVLVGATQNWFDPWGQGTLVTVSS

SEQ ID NO: 23335 - protein, 100 aa, Homo sapiens
KGSGYSFSTYWIGWVRQMPGKGLEWMGIIYPGDSDTRYSPSFQGQVTISANKSINTAYLQWSSLKASDTAIYYCARGVLVGATQNWFDPWGQGTLVTVSS

SEQ ID NO: 23336 - protein, 100 aa, Homo sapiens
KGSGYSFSSYWIGWVRQMPGKGLEWMGIIYPGDSDTRYSPSFQGQVTISADKSISTAYLQWSSLKASDTAMYYCARGVLVGATQNWFDPWGQGTLVTVSS

SEQ ID NO: 23337 - protein, 100 aa, Homo sapiens
KGSGYSFTTHWIGWVRQMPGKGLEWMGIIYPGDSDTRYSPSFQGQVTISADKSISTAYLQWSSLKASDTAIYYCARGVLVGATQNWFDPWGQGTLVTVSS

SEQ ID NO: 23338 - protein, 100 aa, Homo sapiens
KGSGYSFTTYWIGWVRQMPGKGLEWMGIIYPGDSDTRYSPSFQGQVTISADKSISTAYLQWSSLKASDTAIYYCARGVLVGATQNWFDPWGQGTLVIVSS

SEQ ID NO: 23339 - protein, 100 aa, Homo sapiens
KGSGYSFTTYWIGWVRQMPGKGLEWMGIIYPGDSDTRYSPSFQGQVTISADKSISTAYLQWSSLKASDTAIYYCARGVLVGATQNWFDPWGQGTLVTVSS

SEQ ID NO: 23340 - protein, 99 aa, Homo sapiens
GSGYSFSTYWIGWVRQMPGKGLEWMGIIYPGDSDTRYSPSFQGQVTISADKSINTAYLQWSSLKASDTAIYYCARGVLVGATQNWFDPWGQGTLVTVSS

SEQ ID NO: 23341 - protein, 100 aa, Homo sapiens; identical to SEQ ID NO: 23331

SEQ ID NO: 23342 - protein, 100 aa, Homo sapiens; identical to SEQ ID NO: 23331

SEQ ID NO: 23343 - protein, 94 aa, Homo sapiens
VASGFTFSNYDMHWVRQATGKGLEWVSGIGYADDTNYPDSVTGRFTVSRENAKNSLYLQMNSLTAGDTAVYYCARGIAGGLDYWGRGTLVTVFS

SEQ ID NO: 23344 - protein, 94 aa, Homo sapiens
AASGFTFSGYDMHWVRQATGKGLEWVSGIGYAGDTNYPESVTGRFTVSRDNGKNSLYLQMNNLRAGDTAVYYCARGIAGGLDYWGRGTLVTVSS

SEQ ID NO: 23345 - protein, 94 aa, Homo sapiens
AASGFTFSNYDMHWVRQATGKGLEWVAGIGYAGDTNYPGSVSGRFTVSRENAKNSLFLQMNSLRVGDTAVYYCARGIAGGLDYWGRGTLVTVSS

SEQ ID NO: 23346 - protein, 94 aa, Homo sapiens
VASGFTFSNYDMHWVRQATGKGLEWVSGIGYADDTNYPDSVTGRFTVSRENAKNSLYLQMNSLTAGDTAVYYCARGIAGGLDYWGQGTLVTVSS

SEQ ID NO: 23347 - protein, 94 aa, Homo sapiens
VASGFTFSNYDMHWVRQAAGKGLEWVSGIGYADDTNYPDSVTGRFTVSRENAKNSLYLQMNSLTAGDTAVYYCARGIAGGLDYWGRGTLVTVFS

SEQ ID NO: 23348 - protein, 94 aa, Homo sapiens
VASGFTFSNHDMHWVRQATGKGLEWVSGIGYADDTNYPDSVTGRFTVSRENAKNSLYLQMNSLTAGDTAVYYCARGIAGGLDYWGRGTLVTVFS

SEQ ID NO: 23349 - protein, 93 aa, Homo sapiens
ASGFTFSSYDMHWVRQTTGKGLEWVSSINTGGDTYYTGSVKGRFIVSRENAKNSLYLQMNSLRAGDTAVYYCARGIAGGLDYWGQGTLVTISS

SEQ ID NO: 23350 - protein, 97 aa, Homo sapiens
AASGFTFSNYWMHWVRQSPGKGLECFSRLNNDGSHTDYADSVKGRFTISRDNAKNTLYLQMNSLRVEDTALYYCVRGTNDWVGIDYWGQGTLVTVSS

SEQ ID NO: 23351 - protein, 96 aa, Homo sapiens
AASGFTFSNYWMHWVRQSPGKGLECFSRLNNDGSHTDYADSVKGRFTISRDNAKNTLYLQMNSLRVEDTALYYCVRGTNDWVGIDYWGQGTLVTVS

SEQ ID NO: 23352 - protein, 97 aa, Homo sapiens
AASGFTFSNYWMHWVRQSPGKGLECFSRLNNDGSHTDYADSVKGRFTISRDNAKNTLHLQMNSLRVEDTALYYCVRGTNDWVGIDYWGQGTLVTVSS

SEQ ID NO: 23353 - protein, 97 aa, Homo sapiens
AASGFTFSNYWMHWVRQSPGKGLEFVSRLNNDGSYRDYADSVKGRFTISRDNAKHTLYLQMNSLRVEDTALYYCVRGTNDWVGIDYWGQGTLVTVSS

SEQ ID NO: 23354 - protein, 97 aa, Homo sapiens; identical to SEQ ID NO: 23350

SEQ ID NO: 23355 - protein, 97 aa, Homo sapiens
AASGFTFSNYWMHWVRQSPGKGLECFSRLNNDGSHTDYADSVKGRFTISRDNAKNTLYLQMNSLRVEDTALYYCVRGTNDWVGIDYRGQGTLVTVSS

SEQ ID NO: 23356 - protein, 96 aa, Homo sapiens
AVSGFTLSDYWMHWVRQVPGKGLVWVSRISHDETTTDYADSAKGRFTISRDAAKNILYLQMNSLRDEDTAVYFCVRGTNDWVGIDYWGQGTLVTVS

SEQ ID NO: 23357 - protein, 97 aa, Homo sapiens
ASGYTFTSYGITWVRQAPGQGLEWMGWISAYNGNTNYAQKFQGRVTMTTDTSTSTAYMELRSLRSDDTAVYYCARGGKEVAGTPLWYWGQGTLVTVS

SEQ ID NO: 23358 - protein, 97 aa, Homo sapiens
ASGYTFTNYGITWVRQAPGQGLEWMGWISAYNGNTNYAQKLQGRVTMTTDTSTSTAYMELRSLRSDDTAVYYCARGGKEVAGTPLWYWGQGSLVTVS

SEQ ID NO: 23359 - protein, 97 aa, Homo sapiens
ASGYTFTSYGITWVRQAPGQGLEWMGWISAYNGNTNYAQKFQGRVTMTTDTYTSTAYMELRSLRSDDTAVYYCARGGKEVAGTPLWYWGQGTLVTVS

SEQ ID NO: 23360 - protein, 97 aa, Homo sapiens; identical to SEQ ID NO: 23357

SEQ ID NO: 23361 - protein, 97 aa, Homo sapiens
ASGYTFTSYGITWVRQAPGQGLEWMGWISAYNGNTNYAQKFQGRVTMTTDTSTSTAYMELRSLRSDDMAVYYCARGGKEVAGTPLWYWGQGTLVTVS

SEQ ID NO: 23362 - protein, 97 aa, Homo sapiens
ASGYTFTNYGITWVRQAPGQGLEWMGWISAYNGNTNYAQKLQGRVTMTTDTTTSTAYMELRSLRSDDTAVYYCARGGKEVAGTPLWYWGQGTLVTVS

SEQ ID NO: 23363 - protein, 97 aa, Homo sapiens; identical to SEQ ID NO: 23358

SEQ ID NO: 23364 - protein, 97 aa, Homo sapiens; identical to SEQ ID NO: 23357

SEQ ID NO: 23365 - protein, 98 aa, Homo sapiens
ASGYTFTAYGVTWVRQAPGHGLEWMGWISAYNGNTNYAQKFQGRVTMTTDTSTSTAYMELRTLRSDDTAVYYCARGGKEVAGTPLWYWGQGTLVTVSS

SEQ ID NO: 23366 - protein, 98 aa, Homo sapiens; identical to SEQ ID NO: 23365

SEQ ID NO: 23367 - protein, 98 aa, Homo sapiens
ASSYTFTAYGVTWVRQAPGHGLEWMGWISAYNGNTNYAQKFQGRVTMTTDTSTSTAYMELRTLRSDDTAVYYCARGGKEVAGTPLWYWGQGTLVTVSS

SEQ ID NO: 23368 - protein, 96 aa, Homo sapiens
AASGFTFNTSPMNWVRQAPGKGLEWVSYINGGSGRIYYADSVKGRFTISRDNGKRSLYLQVNSLRDEDTAVYYCARDLSHWAMDVWGQGTTVTVSS

SEQ ID NO: 23369 - protein, 95 aa, Homo sapiens
AASGFTFNTSPMNWVRQAPGKGLEWVSYINGGSGRIYYADSVKGRFTISRDNGKRSLYLQVNSLRDEDTAVYYCARDLSHWAMDVWGQGTTVTVS

SEQ ID NO: 23370 - protein, 96 aa, Homo sapiens; identical to SEQ ID NO: 23368

SEQ ID NO: 23371 - protein, 96 aa, Homo sapiens; identical to SEQ ID NO: 23368

SEQ ID NO: 23372 - protein, 96 aa, Homo sapiens; identical to SEQ ID NO: 23368

SEQ ID NO: 23373 - protein, 100 aa, Homo sapiens
AASGFTFSTYSMNWVRQAPGKGLEWVSSISDSSTYIYYADSLKGRFTISRDNARNSLYLQMNSLRAEDTAVYYCARDPYCSSNTCLFDYWGQGILVTVSS

SEQ ID NO: 23374 - protein, 100 aa, Homo sapiens; identical to SEQ ID NO: 23373

SEQ ID NO: 23375 - protein, 100 aa, Homo sapiens
AASGFTFSSYSMNWVRQAPGKGLEWVSSISDRSSYIYYAESVKGRFTISRDNAKNSLYLQMNSLRAEDTAVYYCARDPYCSSNTCLFDYWGRGTLVTVSS

SEQ ID NO: 23376 - protein, 100 aa, Homo sapiens
AASGFTFSDYSMNWVRQAPGKGLEWVSSISDSGTYIYYADSVKGRFSISRDNAKNSLYLQMNSLRAEDTAIYYCARDPYCSSNTCLFDYWGQGTLVTVSS

SEQ ID NO: 23377 - protein, 94 aa, Homo sapiens
AASGLTFSRYRMSWVRQAPGKGLEWVANINQDGREKNYMDSVKGRFTISRDNAKSSLFLQMSSLRVEDTALYYCARDEEQLNVWGQGTTVTVSS

SEQ ID NO: 23378 - protein, 94 aa, Homo sapiens
AASGFTFRNFRMSWVRQAPGKGLEWVANIKQDGTEKNYVDSVKGRFAISRDNAKNSLYLQMNSLRAEDTAVYYCARDEEQLNVWGQGTTVTVSS

SEQ ID NO: 23379 - protein, 94 aa, Homo sapiens
AASGFTFRSFWMSWVRQAPGKGLEWVANIKQDGSEKNYVDSVKGRFTISRDNAKNSLYLQMNSLRAEDTAVYYCARDEEQLNVWGQGTTVTVSS

SEQ ID NO: 23380 - protein, 94 aa, Homo sapiens
EASGFTSSNFVMSWVRQAPGKGLEWVANIKQNGRERNYVDSVKGRFTISRDNAKNSLYLQMNSLRAEDTAVYYCARDEEQLNVWGQGTTVTVSS

SEQ ID NO: 23381 - protein, 94 aa, Homo sapiens
AASGFTSSNYVMSWVRQAPGKGLEWVANIKQNGGEKNYVDSVKGRFTISRDNAKNSLYLQMNSLRGEDTAVYYCARDEEQLNVWGQGTTVTVSS

SEQ ID NO: 23382 - protein, 94 aa, Homo sapiens; identical to SEQ ID NO: 23380

SEQ ID NO: 23383 - protein, 94 aa, Homo sapiens
VASGFTFSNFRMSWVRQAPGKGLEWVANIKQDGSEKNYVDSVKGRFTISRDNAKKLLYLQMNSLRGEDTAVYYCARDEEQLNVWGRGTTVTVSS

SEQ ID NO: 23384 - protein, 94 aa, Homo sapiens
AGSGFTFSRFWMSWVRQAPGKGLEWVANIKKDGGEKNYVDSVKGRFTISRDNAKNSLYLQMNSLRVEDTAVYYCARDEEQLNVWGQGTTVTVSS

SEQ ID NO: 23385 - protein, 94 aa, Homo sapiens
VGSGFTFSKFRMSWVRQAPGKGLEWVANIKQDGSEKNYVDSVKGRFTISRDNAKNSLYLQMNSLRAEDMAVYYCARDEEQLNVWGQGTTVIVSS

SEQ ID NO: 23386 - protein, 94 aa, Homo sapiens
AASGFTSSNYWMSWVRQAPGKGLEWVANIKQNGAEKNYVDSVKGRFTISRDNAKNSLYLQMNSLRVEDTAVYYCARDEEQLNVWGQGTTVTVSS

SEQ ID NO: 23387 - protein, 94 aa, Homo sapiens
AASGFSFSRYRMSWVRQAPGKGLEWVANIKQDGSEKNYVDSVKGRVTISRDNAKNSLYLQMNSLGVEDTAIYYCARDEEQLNVWGQGTTVTVSS

SEQ ID NO: 23388 - protein, 94 aa, Homo sapiens
VASGFTFRNFRMSWVRQAPGKGLEWVANIKQDGSEKYYVDSVKGRFTISRDNPKNSLYLQMNSLRAEDTAVYFCARDEEQLNVWGQGTTVTVSS

SEQ ID NO: 23389 - protein, 94 aa, Homo sapiens
VGSGFTFRSYWMSWVRQAPGKGLEWVANIKQDGSEKNYVDSVKGRFTISRDNARNSLFLQMNSLRAEDTAVYYCARDEEQLNVWGQGTTVTVSS

SEQ ID NO: 23390 - protein, 94 aa, Homo sapiens
AASGFTFRSFRMSWVRQAPGKGLEWVANIKQDGTEKNYVDSVKGRFAISRDNAKNSLYLQMNSLRAEDTAVYYCARDEEQLNVWGQGTTVTVSS

SEQ ID NO: 23391 - protein, 94 aa, Homo sapiens
VASGLTFSRYRMSWVRQAPGKGLEWVANIKQDGSEKNYVDSVRGRFTISRDNAKNSVYLQMNSLRAEDTAMYYCARDEEQLNVWGQGTTVTVSS

SEQ ID NO: 23392 - protein, 94 aa, Homo sapiens
EASGFTFRNFRMSWVRQAPGQGLEWVANIKQDGTEKNYVDSVRGRFAISRDNARNLLYLQMNSLRVEDTAVYYCARDEEQLNVWGPGTTVTVSS

SEQ ID NO: 23393 - protein, 94 aa, Homo sapiens
VASGFTFRNFRMSWVRQAPGKGLEWVANIKQDGSERYYVDSVKGRFTISRDNAKNSLYLQMNSLRVEDTAVYFCARDEEQLNVWGQGTTVTVSS

SEQ ID NO: 23394 - protein, 94 aa, Homo sapiens
VGSGFTFRSYWMSWVRQAPGKGLEWVANIKQDGSEKNYVDSVKGRFTISRDNARNSLFLQMNSLRVEDTALYYCARDEEQLNVWGQGTMVTVSS

SEQ ID NO: 23395 - protein, 94 aa, Homo sapiens
AASGLTFRSYRMSWVRQAPGKGLEWVANIKQDGSEKNYADSVKGRFTISRDNAKNSVYLQMNSLRVEDTAFYYCARDEEQLNVWGQGTTVTVSS

SEQ ID NO: 23396 - protein, 94 aa, Homo sapiens
EASGFTSSNYWMSWVRQAPGKGLEWVANIKQNGGEKNYVDSVKGRFTISRDNAKNSLYLQMNSLRAEDTGVYYCARDEEQLNVWGQGTTVTVSS

SEQ ID NO: 23397 - protein, 94 aa, Homo sapiens
AASGFTSSNYVMSWVRQAPGKGLEWVANIKQNGGEKNYVDSVKGRFTISRDNAKNSLYLQMNSLRAEDTAVYYCARDEEQLNVWGQGTTVTVSS

SEQ ID NO: 23398 - protein, 94 aa, Homo sapiens
AVSGLTISRYYMSWVRQAPGKGLEWVANIKQDGREKNYVDAVRGRFTISRDNAQNSLHLQMNSLRVEDTAVYYCARDEEQLNVWGQGTTVTVSS

SEQ ID NO: 23399 - protein, 94 aa, Homo sapiens
VASGFTFSNFRMSWVRQAPGKGLEWVANIKQDGSEKNYVDSVKGRFTISRDNAKNLLYLQMNSLRGADTAVYYCARDEEQLNVWGRGTTVTVSS

SEQ ID NO: 23400 - protein, 94 aa, Homo sapiens
AASGFTFSRFWMSWVRQAPGKGLEWVANIKQDGSEKYYVDSVKGRFTISRDNTKNSLYLQMSSLRAEDSAVYYCARDEEQLNVWGQGTTVTVSS

SEQ ID NO: 23401 - protein, 94 aa, Homo sapiens
AASGFTLSRFWMSWVRQAPGKGLEWVANIKQDGSEKYYVDSVKGRFTISRDNAKNSLYLQMNSLRAEDTAVYYCARDEEQLNVWGQGTTVTVSS

SEQ ID NO: 23402 - protein, 94 aa, Homo sapiens
AASGFTLSRFWMSWVRQAPGKGLEWVANIKQDGSEKYYVDSVKGRFTISRDNGKNSLYLQMNSLRAEDTAVYYCARDEEQLNVWGQGTTVTVSS

SEQ ID NO: 23403 - protein, 94 aa, Homo sapiens
AASGFTFSRFWMSWVRQAPGKGLEWVANIKQDGGEKYYVDSVKGRFTISRDNAKNSLYLQMSSLRAEDTAVYYCARDEEQLNVWGQGTTVTVSS

SEQ ID NO: 23404 - protein, 94 aa, Homo sapiens
AASGFTFSRFWMSWVRQAPGKGLEWVANIKQDGSEKYYVDSVKGRFTISRDNAKNSLYLQMSSLRAEDTAIYYCARDEEQLNVWGQGTTVTVSS

SEQ ID NO: 23405 - protein, 94 aa, Homo sapiens
AASGFTLRSFWMSWVRQAPGKGLEWVANIKQDGSEKYYVDSVKGRFTISRDNAKNSLYLQMNSLRAEDTAVYYCARDEEQLNVWGQGTTVTVSS

SEQ ID NO: 23406 - protein, 94 aa, Homo sapiens
AAPGFTLSRFWMSWVRQAPGKGLEWVANIKQDGSERYYVDSVKGRFTISRDNAKNSLYLQMNSLRAEDTAVYYCARDEEQLNVWGQGTTVTVSS

SEQ ID NO: 23407 - protein, 94 aa, Homo sapiens
AASGFTLSRFWMSWVRQAPGKGLEWVANIKQDGSEKNYVDSVKGRFTIFRDNAKNSLYLQMNSLRAEDTAVYYCARDEEQLNVWGQGTTVTVSS

SEQ ID NO: 23408 - protein, 94 aa, Homo sapiens
AGYGFTLSRFWMSWVRQAPGKGLEWVANIKQDGSERYYVDSVKGRFTISRDNAKNSLYLQMNSLRAEDTAVYYCARDEEQLNVWGQGTTVTVSS

SEQ ID NO: 23409 - protein, 94 aa, Homo sapiens; identical to SEQ ID NO: 23401

SEQ ID NO: 23410 - protein, 94 aa, Homo sapiens
EASGFTFRNFRMSWVRQAPGKGLEWVANIKQDGTEKNYVDSVKGRFAISRDNARNSLYLQMNSLRVEDTAVYYCARDEEQLNVWGPGTTVTVSS

SEQ ID NO: 23411 - protein, 94 aa, Homo sapiens
VASGFTFSNFRMSWVRQAPGKGLEWVANIKQDGSEKYYVDSVKGRFTISRDNAKNSLYLQMNSLRAEDTAVYYCARDEEQLNVWGQGTTVTVSS

SEQ ID NO: 23412 - protein, 94 aa, Homo sapiens
VGSGFTFRSYWMSWVRQAPGKGLEWVANIKQDGSEKNYVDSVKGRFTISRDNARNSVFLQMNSLRVEDTALYYCARDEEQLNVWGQGTMVTVSS

SEQ ID NO: 23413 - protein, 94 aa, Homo sapiens
AASGLTFSRYYMSWVRQAPGKGLEWVANIKQDGSEKNYQDSVKGRFTISRDNAKNSLYLQMNSLRAEDTAVYYCARDEEQLNVWGQGTTVTVSS

SEQ ID NO: 23414 - protein, 96 aa, Homo sapiens
AVSGLTFTNAWMSWVRQTPGKGLEWVGRIKSKTNGGTADYATPVKGRFTISRDDSKNTLYLQMNSLKTEDTAVYYCNTDSLVQNYWGQGTLVTVSS

SEQ ID NO: 23415 - protein, 96 aa, Homo sapiens
AVSGLTFTNAWMGWVRQTPGKGLEWVGRIKSKTNGETADYATPVKGRFTISRDDSENTLYLQMNSLKTEDTAVYYCNTDSLVQNYWGQGTLVTVSS

SEQ ID NO: 23416 - protein, 96 aa, Homo sapiens; identical to SEQ ID NO: 23414

SEQ ID NO: 23417 - protein, 96 aa, Homo sapiens
AVSGFTFSDAWMSWVRQAPGKGLEWVGRIKNKINGETTDYGAPVKGRFTISRDDSKNTLYLQMTSLKSEDTAIYYCNTDSLVQNYWGQGILVTVSS

SEQ ID NO: 23418 - protein, 96 aa, Homo sapiens
AVSGFTFSDAWMGWVRQAPGKGLEWVGRIKNKINGETTDYGAPVKGRFTISRDDSKNTLYLQMTSLKSEDTAIYYCNTDSLVQNYWGQGILVTVSS

SEQ ID NO: 23419 - protein, 96 aa, Homo sapiens
AASGLTFSNAWMSWVRQAPGKGLEWVGRIKSKTDAGTTDYGAPVKGRFTISRDDSKNMLYLQMNSLKTEDTAVYYCNTDSLVQNYWGQGTLVTVSS

SEQ ID NO: 23420 - protein, 90 aa, Homo sapiens
AASGFTFSTYWMNWVRQAPGKGLEWVAHIKEDGNEKEYVDSVKGRFTISRDNAKNSLYLQMNSLRVEDTAIYYCARYDFWGQGILVTVSS

SEQ ID NO: 23421 - protein, 89 aa, Homo sapiens
ASGFTFSSYWMNWVRQAPGKGLEWVASINQHGSEKYYVDSVKGRFTVSRDNAKNSLYLQMNSLRVEDTAVYYCARYDFWSQGILVTVSS

SEQ ID NO: 23422 - protein, 92 aa, Homo sapiens
ASGYPFTSYGITWVRQAPGQGLEWMGWISTYNGNTNYAQKFQGRVTMTTETSTTTAYMELRSLRSDDTAVYYCARRNYCDYWGQGTLVTVSS

SEQ ID NO: 23423 - protein, 92 aa, Homo sapiens
ASGYTFTSYGITWVRQAPGQGLEWMGWISPYNGKTLYAQKFQGRVTMTTDTSTTTIYMELRSLISDDTALYYCARRNYCDYWGQGTLVTVSS

SEQ ID NO: 23424 - protein, 100 aa, Homo sapiens
TVSGGSISSSSSSYYWGWIRQPPGKGLEWIGSIYYSGSTYYNSSLKSRVTISVDTSKNQFSLKLSSVTAADAAVYYCARLWLGLRPPDYWGQGTLVTVSS

SEQ ID NO: 23425 - protein, 100 aa, Homo sapiens
TVSGGSISSSSSSYYWGWIRQPPGKGLEWIGSIYYSGSTYYNPSLKSRVTISVDTSKNQFSLKLSSVTAADTAVYYCARLWLGLRPPDYWGQGTLVTVSS

SEQ ID NO: 23426 - protein, 98 aa, Homo sapiens
TVSSGSISSSSYYWGWIRQPPGKGLEWIGSIFYSGSTYYNPSLKSRVTISVDTSKRQFSLKLNSVTAADTAVYYCARLWLGLRPPDYWGQGTLVTVSS

SEQ ID NO: 23427 - protein, 98 aa, Homo sapiens; identical to SEQ ID NO: 23426

SEQ ID NO: 23428 - protein, 98 aa, Homo sapiens
TVSGGSLSSSSYYWGWIRQPPGKGLEWIGSIYYSGSTYYNPSLKSRVTISVDTSKNQFSLKLSSVTAADTAVYYCARLWLGLRPPDYWGQGTLVIVSS

SEQ ID NO: 23429 - protein, 96 aa, Homo sapiens
KGSGYIFTNYWIAWVRQMPGKDLEWMGNIKTADSTTTYSPSFQGQVTMSVDKSISTAYLQWSSLKASDTAMYYCARHWSSSWFGYWGQGTRVTVSS

SEQ ID NO: 23430 - protein, 96 aa, Homo sapiens
KGSGYIFTNYWIAWVRQMPGKDLEWLGNIKTADSTTTYSPSFQGQVTMSVDKSISTAYLQWSSLKASDTAMYYCARHWSSSWFGYWGQGTRVTVSS

SEQ ID NO: 23431 - protein, 96 aa, Homo sapiens
KGSGYSFTNYWIAWVRQMPGKGLEWMGNIQPADSTTTDSPSFQGQVTMSVDKSISTAYLQLSSLKASDTAMYYCARHWSSSWFGYWGQGTRVTVSS

SEQ ID NO: 23432 - protein, 96 aa, Homo sapiens
KGSGYSFTNYWIAWVRQMPGKGLEWMGNINPADSIKIYSPSFQGQVTISADKSISTAYLQWNSLKAADTAMYYCARHWSSSWFGYWGQGTPVTVSS

SEQ ID NO: 23433 - protein, 96 aa, Homo sapiens
KGSGYSFTSYWIAWVRQMPGKGLEWMGIINPADSNKIYSPSFQGQVTISADKSISTAYLQWSSLKAADTAMYYCARHWSSSWFGYWGQGTPVTVSS

SEQ ID NO: 23434 - protein, 96 aa, Homo sapiens
KGSGYSFTSYWIAWVRQMPGKGLEWMGNINPADSNKVYSPSFQGQVTISADKSISTAYLQWNSLKAADTAMYYCARHWSSSWFGYWGQGTPVTVSS

SEQ ID NO: 23435 - protein, 96 aa, Homo sapiens
KTSGYSFTDYWIAWARQTPGKGLEWMGNINPANFDITYSPSFEGQVTISVDTAISSAYFHLHSLEASDTGTYYCARHWSSSWFGYWGQGTLVSVSS

SEQ ID NO: 23436 - protein, 96 aa, Homo sapiens
KTSGYSFTGYWIAWARQTPGKGLEWMGNINPANFDITYSPSFQGQVTISVDTSISTAYLHWNSLEASDTGIYYCARHWSSSWFGYWGQGTLVTVSS

SEQ ID NO: 23437 - protein, 94 aa, Homo sapiens
SGYSFSDYWIAWARQTPGKGLEWMGNINPANFDIRYSPSFQGQVTISVDTSISTAYLHWSSLEASDSGIYYCARHWSSSWFGYWGQGTLVTVSS

SEQ ID NO: 23438 - protein, 96 aa, Homo sapiens
KGSGYSFTSYWIAWVRQMPGKGLEWMGNINPADSNKIYSPSFQGQVTISADKSISTAYLQWNSLKAADTAMYYCARHWSSSWFGYWGQGTPVTVSS

SEQ ID NO: 23439 - protein, 96 aa, Homo sapiens
KTSGYSFSDYWIAWARQTPGKGLEWMGNINPANFDIRYSPSFQGQVTISVDTSISTAYLHWSSLEASDSGLYYCARHWSSSWFGYWGQGTLVTVSS

SEQ ID NO: 23440 - protein, 96 aa, Homo sapiens
KASGYIFTNYWIAWVRQMPGKDLEWLGNIKTADSTTTYSPSFQGQVTMSVDKSISTAYLQWSSLKASDTAMYYCARHWSSSWFGYWGQGTRVTVSS

SEQ ID NO: 23441 - protein, 96 aa, Homo sapiens
KGSGYSFTNYWIAWVRQMPGKDLEWMGNIKPADSTTTYSPSFQGQVTMSVDKSISTAYLQWSSLKASDTAMYYCARHWSSSWFGYWGQGTRVTVSS

SEQ ID NO: 23442 - protein, 101 aa, Homo sapiens
ISGDSVSSNSATWSWIRQSPSRGLEWLGRTYYRSKWSIEYAPSVKSRITINPDTSKNQFSLQLNSVTPDDTAVYYCAREDWKDGDDAFDIWGQGTMVTVSS

SEQ ID NO: 23443 - protein, 101 aa, Homo sapiens
ISGDSVSSNSGTWSWVRQSPSRGLEWLGRTYYRSRWAWEYAVSVKSRISINPDTAKNQFSLQLNSVTPEDTAVYYCAREDWKDGDDAFDIWGQGTVVTVSS

SEQ ID NO: 23444 - protein, 101 aa, Homo sapiens
ISGDSVSSNSATWSWIRQSPSRGLEWLGRTYYRSKWSIEYAPSVKSRIAINPDTSKNQFSLQLNSVTPDDTAVYYCAREDWKDGDDAFDIWGQGTMVTVSS

SEQ ID NO: 23445 - protein, 101 aa, Homo sapiens
ISGDSVSSNSATWSWIRQSPSRGLEWLGRTYYRSRWSIEYAPSVKSRITINSDTSKNQFSLQLNSVTPDDTAVYYCAREDWKDGDDAFDIWGQGTMVTVSS

SEQ ID NO: 23446 - protein, 101 aa, Homo sapiens; identical to SEQ ID NO: 23442

SEQ ID NO: 23447 - protein, 100 aa, Homo sapiens
ISGDSVSSTSATWSWIRQSPSRGLEWLGRTYYRSKWSNDYAVSVKSRITINPDTFKNQFSLQLNSVTPEDTAVYYCAREDWKDGDDAFDIWGQGTMVTVS

SEQ ID NO: 23448 - protein, 101 aa, Homo sapiens
ISGDSVSSNSGTWSWVRQSPSRGLEWLGRTYYRSRWAWEYAASVKSRISINPDTAKNQFSLQLNSVTPEDTAVYYCAREDWKDGDDAFDIWGQGTVVTVSS

SEQ ID NO: 23449 - protein, 101 aa, Homo sapiens; identical to SEQ ID NO: 23442

SEQ ID NO: 23450 - protein, 101 aa, Homo sapiens
ISGDSVSSNSATWSWIRQSPSRGLEWLGRTYYRSKWSFEYAPSVKSRITINPDTSKNQFSLQLNSVAPDDTAVYYCAREDWKDGDDAFDIWGQGTMVTVSS

SEQ ID NO: 23451 - protein, 101 aa, Homo sapiens
ISGDSVSSNSGTWSWIRQSPSRGLEWLGRTYYRSKWFYEYAGSVKSRITINPDTSKNQFSLQLDSVTPEDTAVYYCAREDWKDGDDAFDIWGQGTMVTVSS

SEQ ID NO: 23452 - protein, 101 aa, Homo sapiens; identical to SEQ ID NO: 23442

SEQ ID NO: 23453 - protein, 101 aa, Homo sapiens; identical to SEQ ID NO: 23442

SEQ ID NO: 23454 - protein, 101 aa, Homo sapiens
ISGDSVSSNSATWNWIRRSPSRGLEWLGRTYYRSKWYKEYAESVKSRISINPDTSKNQVSLQLNSAIPEDTAVYYCAREDWKDGDDAFDIWGQGTMVTVSS

SEQ ID NO: 23455 - protein, 101 aa, Homo sapiens
ISGDSVSSNSATWSWIRQSPSRGLEWLGRTYYRSKWFKEYEVSVKSRITINPDTSKNQFSLQLNSVTPEDTAVYYCAREDWKDGDDAFDIWGQGTLVTVSS

SEQ ID NO: 23456 - protein, 101 aa, Homo sapiens; identical to SEQ ID NO: 23442

SEQ ID NO: 23457 - protein, 101 aa, Homo sapiens
ISGDSVSSNSATWSWIRQSPSRGLEWLGRTYYRSKWSIEYAPSVKSRITINPDTSKNQLSLQLNSVTPDDTAVYYCAREDWKDGDDAFDIWGQGTMVTVSS

SEQ ID NO: 23458 - protein, 98 aa, Homo sapiens
AASGFIFSRYAMSWVRQAPGRGLEWVSGISGSGGTIYYADSVKGRFTISRDNSKNTLSLQMNSLRAEDTAVYYCAKDPSRVISAFDIWGQGTMVTVSS

SEQ ID NO: 23459 - protein, 98 aa, Homo sapiens
AASGFTFSSYAMSWVRQAPGKGLEWVSAISGSGGTIYYADSVKGRFTISRDNSKNTLNLQMNSLRAEDTALYYCAKDPSRVISAFDIWGQGTMVTVSS

SEQ ID NO: 23460 - protein, 98 aa, Homo sapiens; identical to SEQ ID NO: 23458

SEQ ID NO: 23461 - protein, 100 aa, Homo sapiens
TVSGDSVTRGSYYWSWIRQPPGKGLEWIGYIFYSGSTRYNPSLESRVTVSIDTSKNQFSLKLTSVTAADTAVYYCARDRGRDGYNKVDYWGRGTLVTVSS

SEQ ID NO: 23462 - protein, 100 aa, Homo sapiens
TVSGDSVSSGSYYWTWIRQSPGKGLEWIGYSFYSGSTNYNPSLESRVTISVDTSKNQFSLKLTSVTAADTAVYYCARDRGRDGYNKVDYWGQGTLVTVSS

SEQ ID NO: 23463 - protein, 100 aa, Homo sapiens
TVSGGSVTSGSYYWSWIRQPPGKGLEWIGYIFYSGSTKYNPSLKSRVTISVDTSKNQFSLKLSSVTAADTAVYYCARDRGRDGYNKVDYWGQGTLVTVSS

SEQ ID NO: 23464 - protein, 100 aa, Homo sapiens
TVSGDSVTRGSYYWSWIRQPPGNGLEWIGYIFYSGSTKYNPSLESRVTVSIDTSKNQFYLKLTSVTAADTAVYYCARDRGRDGYNKVDYWGRGTLVTVSS

SEQ ID NO: 23465 - protein, 100 aa, Homo sapiens
TVSGDSVTTGSYYWSWIRQPPGKGLEWIGYVYYSGSTKYSLALQSRVTISIDTSKNQFSLSLRSMTAADTAVYYCARDRGRDGYNKVDYWGQGTLVTVSS

SEQ ID NO: 23466 - protein, 100 aa, Homo sapiens
TVSGDSVSSGSYYWTWIRQPPGKGLEWIGYIFYSGSTSYNPSLKSRVSISVDTSKNQFSLKLNSVTAADTAVYYCARDRGRDGYNKVDYWGQGTLVSVSS

SEQ ID NO: 23467 - protein, 100 aa, Homo sapiens
TVSGDSVSRGSYYWSWIRQPPGKGLEWIGYIFYSGSTKYNPSLESRVTVSIDTSKNQFSLKLTSVTAADTAVYYCARDRGRDGYNKVDYWGRGTLVTVSS

SEQ ID NO: 23468 - protein, 100 aa, Homo sapiens; identical to SEQ ID NO: 23462

SEQ ID NO: 23469 - protein, 100 aa, Homo sapiens
TVSGDSVTRGSYYWNWIRQPPGKGLEWIGYIFYSGSTRYNPSLESRVTVSIDTSKNQFSLKLTSVTAADTAVYYCARDRGRDGYNKVDYWGRGTLVTVSS

SEQ ID NO: 23470 - protein, 100 aa, Homo sapiens
ASGYTFSNYAMHWVRQAPGQRLEWMGWINGGNGNTEYSQKFQGRITITRDTSANTAYMELSSLRSEDTAVYYCARVYCSSTSCLYYLDYWGQGTLVTVSS

SEQ ID NO: 23471 - protein, 100 aa, Homo sapiens
ASGYTFTSYAMHWVRQAPGQSLEWMGWINVGNGNAEYSQKFQGRVTITRDTSASTAYMEVSSLRSEDTAIYYCARVYCSSTSCLYYLDYWGQGTPVTVSS

SEQ ID NO: 23472 - protein, 90 aa, Homo sapiens
AVSGFTFRRYWMHWVRQVPGEGLVWVSRINEDGRITTSADSVTGRLTISRDNAKSSLYLQINSLRAEDTAVYYCVRGMGDCWGQGTLVTV

SEQ ID NO: 23473 - protein, 90 aa, Homo sapiens
AASGFSFRSYWMHWVRQVPGVGLVWVSRINRDGTITTSADSVTGRFTISRDNAKSSLLLQIDSLRPEDTAVYYCVRGMGDCWGQGTLVTV

SEQ ID NO: 23474 - protein, 90 aa, Homo sapiens
AASGFTFRSYWMHWVRQVPGVGLVWVSRINRDGTITTSADSVTGRFTISRDNAKSSLFLQIDSLRPEDTAVYYCVRGMGDCWGQGTLVTV

SEQ ID NO: 23475 - protein, 92 aa, Homo sapiens
AASGFTFRNDWMHWVRQVPGKGLVWISRINGGGSLISYADSVKGRFTVSRDNAKKTLYLQMNNLRAEDTAVYSCVRGMGDCWGRGTLVTVSS

SEQ ID NO: 23476 - protein, 90 aa, Homo sapiens
VASGFTFRSYWMHWVRQVPGEGLAWVSRINRDGTITTSADSVTGRFTISRDNAKSSLYLQINSLRAEDTAVYYCVRGMGDCWGQGTLVTV

SEQ ID NO: 23477 - protein, 97 aa, Homo sapiens
AASGFTFNTYAMNWVRQAPGKGLEWVSAVGGSGTNTYYADSVKGRFTISRDNPKNTLYLQMNSLRADDTAVYYCAKDRGSGWTFDYWGQGTLVTVSS

SEQ ID NO: 23478 - protein, 97 aa, Homo sapiens; identical to SEQ ID NO: 23477

SEQ ID NO: 23479 - protein, 97 aa, Homo sapiens
AASGFIFSSYAMSWVRQAPGKGLEWVSLIYSGGSSTYYADSVKGRFTISRDNSKNTLFLQMNSLRADDTAVYFCAKDRGSGWTFDYWGQGTLVTVSS

SEQ ID NO: 23480 - protein, 97 aa, Homo sapiens
VASGFSFSDYYMTWIRQAPGKGLEWVSYITTSGTYTNDADSVKGRFTISRDNAKNSLFLQMNSLRVEDTAVYYCARLGGSGWSKDYWGQGTLVAVSS

SEQ ID NO: 23481 - protein, 97 aa, Homo sapiens
AASGFTFSDYYMTWIRQAPGKGLEWVSYITSSGTHTNDADSVKGRFTISRDNAKNSLFLQMNSLRVEDTAVYYCARLGGSGWSKDYWGQGTLVAVSS

SEQ ID NO: 23482 - protein, 97 aa, Homo sapiens
AASGFTFSDYYMTWIRQAPGKGLEWVSYITSSGTYTNDADSVKGRFTISRDNAKNSLFLQMNSLRAEDTAVYYCARLGGSGWSKDYWGQGTLVAVSS

SEQ ID NO: 23483 - protein, 97 aa, Homo sapiens; identical to SEQ ID NO: 23481

SEQ ID NO: 23484 - protein, 97 aa, Homo sapiens
AASGFTFSDYYMTWIRQAPGKGLEWVSYITSSSTHTNYADSVKGRFTISRDNAKNSLYLQMNSLRGDDTAVYYCARLGGSGWSKDYWGQGTLVTVSS

SEQ ID NO: 23485 - protein, 97 aa, Homo sapiens; identical to SEQ ID NO: 23482

SEQ ID NO: 23486 - protein, 96 aa, Homo sapiens
VSGFTFSDYYMTWIRQAPGKGLEWVSYITNSGSHTNYADSVKGRFTISRDNAKNSLYLQMNSLRAEDTAVYYCARLGGSGWSKDYWGQGTLVTVSS

SEQ ID NO: 23487 - protein, 97 aa, Homo sapiens
AASGFTFSDYYMTWIRQAPGKGLEWVSYITSSGTYTNDADSVKGRFTISRDNAKNSLFLQMNSLRVEDTAVYYCARLGGSGWSKDYWGQGTLVAVSS

SEQ ID NO: 23488 - protein, 97 aa, Homo sapiens
AASGFTFSDYYMTWIRQAPGKGLEWVSYISSTGTHTNDADSVKGRFTISRDNAKNSLFLQMNSLRVEDTAVYYCARLGGSGWSKDYWGQGTPVAVSS

SEQ ID NO: 23489 - protein, 97 aa, Homo sapiens
AASGFTFSDYYMTWIRQAPGKGLEWVSYITSSSSYTNDADSVKGRFTISRDNAKNSLYLQMNNLRAEDTAVYYCARLGGSGWSKDYWGQGTLVTVSS

SEQ ID NO: 23490 - protein, 97 aa, Homo sapiens
AASGFTFSDYYMTWIRQAPGKGLEWVSYITNSGTSTNDADSVKGRFTISRDNAKNSLFLQMNRLRVEDTAVYYCARLGGSGWSKDYWGQGTLVAVSS

SEQ ID NO: 23491 - protein, 97 aa, Homo sapiens
AASGFTFSDYYMTWIRQAPGKGLEWVSYISTSSSHTNYADSVKGRFTISRDDAKNSLYLQMNSLRAEDTAVYYCARLGGSGWSKDYWGQGTLVAVSS

SEQ ID NO: 23492 - protein, 96 aa, Homo sapiens
AASGFTFSTYSMSWVRQVPGKGLEWVATIHRDETKYYVDSVKGRFTISRDNAKNSVYLQMNSLSAEDTAVYYCARWRWQQSEFDSWGQGTLVTVSS

SEQ ID NO: 23493 - protein, 97 aa, Homo sapiens
AASGFIFRNYYMSWVRQAPGMGLEWVASVEHDGSKEYYADSVKGRFTISRDNTKNSMSLQMHSLTVDDTAVYYCARWRWQQSEFDSWGQGILVTVSS

SEQ ID NO: 23494 - protein, 98 aa, Homo sapiens
AASGFTFSNYAMSWVRQAPGKGLEWVSSISASSGSTYYTDSVKGRFTISRDTSKNTLYLQMNSLRAEDTAVYYCAKDRGMVRGVGDSWGQGTLVTVSS

SEQ ID NO: 23495 - protein, 98 aa, Homo sapiens
AASGFTFTNYALTWVRQAPGKGLDWVSSISASSGSTYYTDSVQGRFTISRDTPKNTLFLQMNSLRAEDTAVYYCAKDRGMVRGVGDSWGQGTLVTVSS

SEQ ID NO: 23496 - protein, 98 aa, Homo sapiens
AASGFAISIYWMSWVRQAPGERLEWVANIKPDGSEIYYVDSVKGRFTISRDNAKNSLYLQMNNLRAEDTAVYYCARHAYTSAWYGGFWGQGTPVTVSS

SEQ ID NO: 23497 - protein, 98 aa, Homo sapiens
AASGFSFSTYWMNWVRQAPGKGLEWVACIKPDGSEIFYVDSVKGRFTISRDNPKNSLFLQMNSLRAEDTAVYYCARHAYTSAWYGGFWGQGTLVTVSS

SEQ ID NO: 23498 - protein, 93 aa, Homo sapiens
AASGFTFSTNSMNWVRQAPGKGLEWLSFISSSGSAIYNADSAKGRFIISRDNAKNSLFLQMNSLRDEDTAVYYCARDTILDFWGQGTLVTVSS

SEQ ID NO: 23499 - protein, 93 aa, Homo sapiens
AASGFPFTTYSMNWVRQAPGKGLEWVSYISSSSTVIYYADSVRGRFTVSRDNAKNSLYLDMNSLRDEDTAFYYCARDTILDFGGQGTLVTVSS

SEQ ID NO: 23500 - protein, 92 aa, Homo sapiens
VASGFTFSSYAMSWVRQAPGKGLEWVSAISGSGGSTFSADSVKGRFTISRDNPKNTLYLQMNSLRAEDTAVYYCYYYGLDVWGQGTTVTVAS

SEQ ID NO: 23501 - protein, 92 aa, Homo sapiens
AASGFTFSNYAMSWVRQAPGKGLEWVSAISGSGDSTYYADSVKGRFTISRDNSKNTLYLQMNSLRVEDTAVYYCYYYGLDVWGQGTTVTVSS

SEQ ID NO: 23502 - protein, 92 aa, Homo sapiens
AASGFTFSSYAMSWVRQAPGKGLEWVSGISSNGGSTYYADSVKGRFTISRDNSKNTLYLQMNSLRAEDTAVYYCYYYGLDVWGQGTTVTVSS

SEQ ID NO: 23503 - protein, 92 aa, Homo sapiens
AASGFTFSSYAMSWVRQAPGKGLEWVSAISGSDDSTYYADSVKGRFTISRDNSKNTLYLQMNSLRAEDTAVYYSYYYGLDVWGQGTTVTVSS

SEQ ID NO: 23504 - protein, 92 aa, Homo sapiens
AASGFTFSSYAMSWVRQAPGKGLEWVSAISANGGSTYYADSVKGRFTISRDNSKNTLYLQMNSLRAEDTAVYYSYYYGLDVWGQGTTVTVSS

SEQ ID NO: 23505 - protein, 92 aa, Homo sapiens
AASGFTFSSYALSWVRQAPGKGLEWVSALSSSGASTYYADSVKGRFTISRDNSKSTLYLQMNSLRAEDTAVYYCYYYGLDVWGQGTTVTVSS

SEQ ID NO: 23506 - protein, 100 aa, Homo sapiens
AASGFTFDRFWMIWVRQAPGKGLEWVANIKEDGSQRYYVDSVKGRFTISRDNAKNSLYLQMNSLRAEDTAVYYCARLHSGYDWGDAFDIWGQGTMVTVSS

SEQ ID NO: 23507 - protein, 100 aa, Homo sapiens
AASGFTFSSSWMIWVRQAPGKGLEWVANIKEDGGQRYYIDSVKGRFTISRDNAKNSLYLQMNSLRAEDTAVYYCARLHSGYDWGDAFDIWGHGTMVTVSS

SEQ ID NO: 23508 - protein, 100 aa, Homo sapiens
AASGFTFGSYWMTWVRQAPGKGLEWVANIKEDGSQKYYVDSVRGRFRFSRDNAKNSLYLQMDSLRVEDTAVYYCARLHSGYDWGDAFDIWGQGTMVTVSS

SEQ ID NO: 23509 - protein, 99 aa, Homo sapiens
ASGFTFSSYWMSWVRQAPGKGLEWVANIKEDGSEKYYVDSVKGRFTISRDNAQKSLYLQMNSLRAEDTAMYSCARLHSGYDWGDAFDIWGQGTMVTVSS

SEQ ID NO: 23510 - protein, 100 aa, Homo sapiens
VASGFTFSSSWMIWVRQAPGKGLEWVANIKEDGSQKYYIDSVKGRFTISRDNAKNSLYLQMNSLRAEDTAVYYCARLHSGYDWGDAFDIWGHGTMVTVSS

SEQ ID NO: 23511 - protein, 99 aa, Homo sapiens
ASGFTFSNYAMSWVRQHPGKGLEWVSTISGGGYTYNADSVKGRLTISRDNSKNTLYLQMNSLKVDDTAVYYCARAGCSGGNCYRPPDFWGQGTLVTASS

SEQ ID NO: 23512 - protein, 101 aa, Homo sapiens
AASGFTYSDYAMSWVRQAPGKGLEWVSIINGGGDTTYYAGSVKGRFTVSRDNSKNTLYLRMNSLRAEDTAVYYCARAGCSGGNCYRPPDFWGQGTLVTVSS

SEQ ID NO: 23513 - protein, 95 aa, Homo sapiens
AASGFTFSSYWMTWVRQAPGKGLEWVANIKQDGSEKYYVDSVKGRFTISRDNAKNSLYLQMNSLRAEDTAVYYCARAIGAAESYWGQGTLVTVSS

SEQ ID NO: 23514 - protein, 95 aa, Homo sapiens
AASGFTFSDYWMHWVRQAPGKGLEWVANVDPDGATKYYVDSVKGRFTISRDNAKNSLSLQMNSLRAEDTAVYYCARAIGAAESYWGKGSLVTVSS

SEQ ID NO: 23515 - protein, 97 aa, Homo sapiens
TVFGGSIITSTYFWGWIRQPPGKGLEWIGSIYYSGSTEYNPSLESRVTMSVDMSRNQFSLNLRSVSASDTAIYYCARRAPRNWFDPWGQGTLVSVSS

SEQ ID NO: 23516 - protein, 97 aa, Homo sapiens
TVSGGSISSSSYYWGWIRQSPGKGLEWIGSIYYSGSTYYNPSLKSRVTISVDTSKNQFSLKLSSVTAADAAVYYCARRAPRNWFDPWGQGTLVTVSS

SEQ ID NO: 23517 - protein, 96 aa, Homo sapiens
AASGFTFSNYGMHWVRQAPGKGLEWVAIIWHDGSNKYYADSVKGRFTISRDSSKNTLYLQMNSLRAEDTAVYYCARNTGTYSLDYWGLGTLVTVSS

SEQ ID NO: 23518 - protein, 96 aa, Homo sapiens
AASGFTFSGFGMHWVRQAPGKGLEWVSIIWHDGSNKYYGDSVKGRFTISRDDSKNTLYLQMNSLGADDTAVYYCARNTGTYSLDYWGQGTLVTVSS

SEQ ID NO: 23519 - protein, 96 aa, Homo sapiens
ISGDSVSSNSAAWNWIRQSPSGGLEWLGRTYYRSKWYHDYAASVKSRITINPDTSKNLFSLQLNSVTPEDTAVYYCAGGTGTFDYWGQGTLVTVSS

SEQ ID NO: 23520 - protein, 96 aa, Homo sapiens
ISGDSVSSNTAAWNWFRQSPSRGLEWLGRTYYRSKWYYDYAVSVKGRITIDPDTSKNQFSLQLKSLTPEDTAVYYCAGGTGTFDYWGQGTLVTVSS

SEQ ID NO: 23521 - protein, 96 aa, Homo sapiens; identical to SEQ ID NO: 23520

SEQ ID NO: 23522 - protein, 96 aa, Homo sapiens; identical to SEQ ID NO: 23520

SEQ ID NO: 23523 - protein, 96 aa, Homo sapiens
ISGDSVSSNSEAWNWFRQSPSRGLEWLGRTYYRSKWYHDYAVSVKSRITIDPDTSKNQFSLQLKSLTPEDTAVYYCAGGTGTFDYWGQGTLVTVSS

SEQ ID NO: 23524 - protein, 96 aa, Homo sapiens
ISGDSVSSNSEAWNWFRQSPSRGLEWLGRTYYRSKWYHDYAVSVKSRITIDPDTSKNQFSLHLKSLTPEDTAVYYCAGGTGTFDYWGQGTLVTVSS

SEQ ID NO: 23525 - protein, 96 aa, Homo sapiens
ISGDSVSSNTAAWNWFRQSPSRGLEWLGRTYYRSKWYYDYSVSVKGRITIDPDTSKNQFSLQLKSLTPEDTAIYYCAGGTGTFDYWGQGTLVTVSS

SEQ ID NO: 23526 - protein, 96 aa, Homo sapiens
ISGDSVSSNTDAWNWFRQSPSRGLEWLGRTYYRSKWYYDYAVSVKGRITIDPDTSKNQFSLQLKSLTPEDTAVYYCAGGTGTFDYWGQGTLVTVSS

SEQ ID NO: 23527 - protein, 96 aa, Homo sapiens
ISGDSVSSNSAAWNWFKQSPSRGLEWLGRTYYRSKWYYDYAVSVKSRITIDPDTSKNQFSLQLKSLTPEDTAVYYCAGGTGTFDYWGQGTLVTVSS

SEQ ID NO: 23528 - protein, 96 aa, Homo sapiens; identical to SEQ ID NO: 23520

SEQ ID NO: 23529 - protein, 96 aa, Homo sapiens
ISGDSVSSNSAAWNWFRQSPSRGLEWLGRTYYRSKWYYDYAVSVKSRITIDPDTSKNQFSLQLKSLTPEDTAVYYCAGGTGTFDYWGQGTLVTVSS

SEQ ID NO: 23530 - protein, 96 aa, Homo sapiens; identical to SEQ ID NO: 23520

SEQ ID NO: 23531 - protein, 96 aa, Homo sapiens
VVSGFTFSSYRMNWVRQAPGKGLEWVSHISSSGTTTYYADSVKGRFTVSRDNAKNSLYLQMNSLRDEDTAVYYCARASLAGTPPHWGQGTLVTVSS

SEQ ID NO: 23532 - protein, 96 aa, Homo sapiens
AASGFSFSTYRMNWVRQAPGKGLEWVSHITSSGSTTYYADSVKGRFTVSRDNAKNSLFLQMNSLRDEDTAVYYCARASLAGTPPHWGQGTLVTVSS

SEQ ID NO: 23533 - protein, 96 aa, Homo sapiens
AASGFTFSSYRMNWVRQAPGKGLEWVSHITSSGSTTYYADSVKGRFTVSRDNAKNSLFLQLNILRDEDTAVYYCARASLAGTPPHWGQGTLVTVSS

SEQ ID NO: 23534 - protein, 96 aa, Homo sapiens
AASGFTFSTYRMNWVRQAPGKGLEWISHITSSGSTTYYADSVKGRFTVSRDNAKNSLFLQMNSLRDEDTAVYYCARASLAGTPPHWGQGTLVTVSS

SEQ ID NO: 23535 - protein, 96 aa, Homo sapiens
AASGFTFSSYRMNWVRQAPGKGLEWVSHITSGGSSMYYAGSVKGRFTVSRDNAKNSLYLQMNSLRDEDTAVYYCARASLAGTPPHWGQGTLVTVSS

SEQ ID NO: 23536 - protein, 96 aa, Homo sapiens
AASGFTFSSYRMNWVRQAPGKGLEWVSHITSSGSTTYYADSVKGRFTVSRDNAKNSLFLQMNGLRDEDTAVYYCARASLAGTPPHWGQGTLVTVSS

SEQ ID NO: 23537 - protein, 96 aa, Homo sapiens
AASGFTFSSYRMNWVRQAPGKGLEWVSHISSSGSTTYYADSVKVRFTVSRDNAKNSLYLQMNSLRDEDTAVYYCARASLAGTPPHWGQGTLVTVSS

SEQ ID NO: 23538 - protein, 96 aa, Homo sapiens
AASGFTFSSYRMNWVRQAPGKGLEWVSHISSSGSTTYYADSVKGRFTVSRDNAKNSLYLQMNSLRDEDTAVYYCARASLAGTPPHWGQGTLVTVSS

SEQ ID NO: 23539 - protein, 96 aa, Homo sapiens
AASGFTFSSYRMNWVRQAPGKGLEWVSHITSSGSTTYYADSVKGRFTVSRDNAKNSLFLQMNSLRDEDTAVYYCARASLAGTPPHWGQGTLVTVSS

SEQ ID NO: 23540 - protein, 96 aa, Homo sapiens
AASGFAFSSYRMNWVRQAPGKGLEWVSHISRSGGTIYYADSVKGRFTASRDDAKNSLYLQLSSLRDEDTAVYYCARASLAGTPPHWGQGTLVTVSS

SEQ ID NO: 23541 - protein, 96 aa, Homo sapiens
AASGFTFSSYRMNWVRQAPGKGLEWVSHINNIGSTIYYADSVKGRFTVSRDNAKNSLYLQMNSLRDEDTAVYYCARASLAGTPPHWGQGTLVTVSS

SEQ ID NO: 23542 - protein, 96 aa, Homo sapiens
AASGFTFSSYRMNWVRQAPGKGLEWVSHINNVGSTIYYADSVKGRFTVSRDNAENSLYLQMNSLRDEDTAVYYCARASLAGTPPHWGQGTLVTVSS

SEQ ID NO: 23543 - protein, 96 aa, Homo sapiens
AASGFTFSSYRMNWVRQAPGKGLEWVSHITSSGSTTYYAGSVKGRFTVSRDNAKNSLFLQMNSLRDEDTAVYYCARASLAGTPPHWGQGTLVTVSS

SEQ ID NO: 23544 - protein, 91 aa, Homo sapiens
VSGFTFSTYWMHWVRQAPGKGLVWVARINAHGSITNYADSVKGRFTISRDNAKNALYLQMKSLRVDDTAVYYCVKGMGDSWGQGSLVTVSS

SEQ ID NO: 23545 - protein, 92 aa, Homo sapiens
AASGFTFGGSWMHWVRQVPGKGLVWVARINRDASLSTCADSVRGRFTISRDNTRNTLSLQMKNLRAEDTALYYCVKGMGDSWGQGTLVTVSS

SEQ ID NO: 23546 - protein, 91 aa, Homo sapiens
VSGFTFSTHWMHWVRQAPGKGLVWVARINAHGSITNYADSVKGRFTISRDNAKNALYLQMKSLRVDDTAVYYCVKGMGDSWGQGSLVTVSS

SEQ ID NO: 23547 - protein, 92 aa, Homo sapiens
VASGFNFNAHWMHWVRRAPGKGLVWVSRINSDGSLTNYADSVKGRFTISRDNAKNTLYLQMNSLRVEDTAVYFCVKGMGDSWGQGSLVTVSS

SEQ ID NO: 23548 - protein, 96 aa, Homo sapiens
AVSGFTFTNYWMSWARQTPGRGLEWVANINEGGSARWYVDSVEGRFTISRDNARKLVYLQMDGLTAEDTAIYYCARNPDAGTADYWGQGILVTVSS

SEQ ID NO: 23549 - protein, 96 aa, Homo sapiens
ETSGFSFSDYWMSWARQAPGKGLEWVANINEPGNDKYYVDSVRGRFTISRDNVRRSVFLEIHSPRAEDTAVYYCARNPDAGTADYWGLGTLVTVSS

SEQ ID NO: 23550 - protein, 98 aa, Homo sapiens
TVSGASISNRNYYWSWIRQSPGKGLEWIGGVSYSGNTYYNPSLKSRVTISVDASKNQFSLKLRSVTAADAALFYCARRGSENYWIDSWGQGTLVIVSS

SEQ ID NO: 23551 - protein, 98 aa, Homo sapiens
SVSGDSISSGSFYWGWIRQPPGKGLEWIGGIFYTGKTYYNPSLKSRVTISVDTSKNQFSLKLSSVTAADTAVYYCARRGSENYWIDSWGQGTLVSVSS

SEQ ID NO: 23552 - protein, 98 aa, Homo sapiens
TVSGGSISSRIYYWSWIRQSPGKGLEWIGGVSYSGNTYYNPSLKSRVTISLDTSKNQFSLKLTSVTAADTAVYYCARRGSENYWIDSWGQGTLVTVSS

SEQ ID NO: 23553 - protein, 98 aa, Homo sapiens
TVSGASISNRNYYWSWIRQSPGKGLEWIGGVSYSGNTYYNPSLKSRVTISVDASKNQFSLKVSSVTAADTALYYCARRGSENYWIDSWGQGTLVIVSS

SEQ ID NO: 23554 - protein, 98 aa, Homo sapiens
SVSGGSISSSRYYWGWIRQSPGKGLEWIGGVSYGGNTYYNSSLKSRVTIFVDTSNNKFSLKMRSVTAADTAVYYCARRGSENYWIDSWGQGTLVTVSS

SEQ ID NO: 23555 - protein, 98 aa, Homo sapiens; identical to SEQ ID NO: 23552

SEQ ID NO: 23556 - protein, 98 aa, Homo sapiens
TVSGGSISSRSYYWSWIRQSPGKGLEWIGGVSYSGNSYYNPSLKSRVTISVDTSKNQFSLKLTSVTAADTAVYYCARRGSENYWIDSWGQGTLVTVSS

SEQ ID NO: 23557 - protein, 98 aa, Homo sapiens
TVSGGSISSSSYYWGWIRQPPGKGLEWIGGISFGGNTYYNPSLKSRVTISVDTSKNQFSLKVNSVTAADTAVYYCARRGSENYWIDSWGQGTLVTVSS

SEQ ID NO: 23558 - protein, 98 aa, Homo sapiens
TVSGGSIISSSYYWGWIRQPPGKGLEWIGSISSSGRTYYNPSLKSRVTISVDMSKNHFYLKLRSVTAAETAVFYCARRGSENYWIDSWGQGTLVIVSS

SEQ ID NO: 23559 - protein, 98 aa, Homo sapiens
TVSGGSISRSSYYWGWIRQPPGKGLEWIGGIFYSGKTYYNPSLKSRVTISVDTSKNQFSLKLNSVTAADTAVYYCARRGSENYWIDSWGQGTLVTVSS

SEQ ID NO: 23560 - protein, 98 aa, Homo sapiens
TVSGGSISSRNYYWSWIRQSPGKGLEWIGGISYSGNTYYNPSLKSRVTISLDTSKNQFSLKLTSVTAADTAVYYCARRGSENYWIDSWGQGTLVTVSS

SEQ ID NO: 23561 - protein, 105 aa, Homo sapiens
TASGFIFGDHGVSWFRQAPGKGLEWVGFIRKKTHGGTTEYAASVKGRFTISRDDSKSVAYLQMNSLKTEDTAIYYCSRDFSGYCSMTSCYAFDYWGQGTLVTVSS

SEQ ID NO: 23562 - protein, 105 aa, Homo sapiens; identical to SEQ ID NO: 23561

SEQ ID NO: 23563 - protein, 105 aa, Homo sapiens
TASGFTFGDYGLSWFRQAPGKGLQWVGFIRRKAHGGTTEYAASVKGRFTISRDDSKSIAYLQMNSLKTEDTGVYYCSRDFSGYCSMTSCYAFDYWGQGTLVTVSS

SEQ ID NO: 23564 - protein, 96 aa, Homo sapiens
TVSGGSMSNYYWSWIRQPPGKGLEWIGYIYYSGATNYNPSLKSRVTMSADTSKNQLSLKLTSVTAADTAVYYCARRDSSRWFLDYWGQGALVTVSS

SEQ ID NO: 23565 - protein, 96 aa, Homo sapiens
TVSDGSLSGYYWSWIRQPPGMGLEWIGYLYYTGTTNYNPSLKSRVTISLGTSKNQFSLKLSSVTAADTAVYFCARRDSSRWFLDYWGRGTLVTVSS

SEQ ID NO: 23566 - protein, 98 aa, Homo sapiens
AASGFTVSGNYLSWVRQAPGRGLEWVSVIYAGGTTYYVDSVKGRFTISRDNSQNTLYLQMNSLRAEDTAVYYCARDFHDFWSGTLGYWGQGTQVTVSS

SEQ ID NO: 23567 - protein, 98 aa, Homo sapiens
AASGFTVSSNYMTWVRQAPGKGLEWVSVLYSGGTTYYADSVKGRFTISRHNSKDTLYLQMNSLRVEDTAVYYCARDFHDFWSGTLGYWGQGSLVSVSS

SEQ ID NO: 23568 - protein, 98 aa, Homo sapiens
AASGFTVSGNYLSWVRQAPGRGLEWVSVIYAGGTTHYVDSVKGRFTISRDNSQNTLYLQMNSLRGEDTAVYYCARDFHDFWSGTLGYWGQGTQVTVSS

SEQ ID NO: 23569 - protein, 97 aa, Homo sapiens
VVSGFTFSSYWMHWVRQVPGKGLMWVSRTNTDGSSTNYADSVKGRFTISRDNAKGTLHLQMNSLRDDDTAVYYCVRGTNGWYGIDYWGQGVLVTVSS

SEQ ID NO: 23570 - protein, 97 aa, Homo sapiens
AASGFIFRSYWMHWFRQAPGKGLVWVSRINTDGSSIDYADSVKGRFTISRDNAKNTLYLQMNSLGADDAALYYCVRGTNGWYGIDYWGQGALVTVSS

SEQ ID NO: 23571 - protein, 97 aa, Homo sapiens
AASGFFFRSYWMHWVRQAPGKGLVWVSRIDNDGSTINYADSVKGRFTISRDNAKNTLYLQMNSLGADDTALYYCVRGTNGWYGIDYWGQGTLVTVSS

SEQ ID NO: 23572 - protein, 97 aa, Homo sapiens
AASGFTFSSYWMHWVRQAPGKGLVWVSRINNDGNFANYADSVQGRFTISRDNAMNTLYLQMNSLGAEDTAVYYCVRGTNGWYGIDYWGQGTLVTVSS

SEQ ID NO: 23573 - protein, 98 aa, Homo sapiens
TVSGGSISSRSYYWSWIRQSPGKGLEWIGGVSYTGNTYYNPSLKSRVIISIDTSKNQFSLKLTSVTAADTAIFYCARRGSENYWVDSWGQGTLVTVSS

SEQ ID NO: 23574 - protein, 98 aa, Homo sapiens
TVSGGSISRSNYYWGWIRQPPGKGLEWIGSIHYSGRIYYNSSLKSRVTISVDTTKNQFSLKVSSVTAADTAVYYCARRGSENYWVDSWGQGAPVTVSS

SEQ ID NO: 23575 - protein, 98 aa, Homo sapiens
TVSGGSIIGSGYYWGWIRQPPGKGLEWIGSISSSGRTYYNPSLKSRVTISVDTSKNHFSLKLSSVTAAETAVYYCARRGSENYWVDSWGQGTLVIVSS

SEQ ID NO: 23576 - protein, 98 aa, Homo sapiens
TVSGDSVSSGSFYWGWIRQPPGKGLEWIGSVSYSGRTYYNPSLKSRVTISVDPSKNQFSLKLNSVTATDTAVYYCARRGSENYWVDSWGQGALVTVSS

SEQ ID NO: 23577 - protein, 98 aa, Homo sapiens
TVSGGSISRSSYYWGWIRQPPGKGLEWIGSIHYSGRIYYNPSLKSRVTISVDTTKNQFSLKLSSVTAADTAVYYCARRGSENYWVDSWGQGAPVTVSS

SEQ ID NO: 23578 - protein, 98 aa, Homo sapiens
TVSGGSIISRSYYWGWIRQPPGKELEWIGSISSSGRTYYNPSLKSRVTISVDTSKNQFSLKLSSVTAAETAVYYCARRGSENYWVDSWGQGTLVIVSS

SEQ ID NO: 23579 - protein, 98 aa, Homo sapiens; identical to SEQ ID NO: 23577

SEQ ID NO: 23580 - protein, 98 aa, Homo sapiens
TVSGGSIISSSYYWGWIRQPPGKGLEWIGSISSSGRTYYNPSLKSRVTISVDTSKNHFSLKLSSVTAAETAVYYCARRGSENYWVDSWGQGTLVIVSS

SEQ ID NO: 23581 - protein, 98 aa, Homo sapiens
IVSGGSIISSSYYWGWIRQPPGKGLEWIGSISSSGRTYYNPSLKSRVTISVDTSKNHFSLKLNSVTAAETAVYYCARRGSENYWVDSWGQGTLVIVSS

SEQ ID NO: 23582 - protein, 98 aa, Homo sapiens
TVSGGSIGSGAYYWAWIRQPPGKGLEWIGGGHYSGSAYFNPSLKSRVTISVDTSKNQFSLKLTSVTATDTAVYYCARRGSENYWVDSWGQGTLVTISS

SEQ ID NO: 23583 - protein, 98 aa, Homo sapiens; identical to SEQ ID NO: 23577

SEQ ID NO: 23584 - protein, 95 aa, Homo sapiens
ASGYTFTDYLLHWVRQAPGQGLEYMGFIVPYDGVTGYGQRLQGRLTMARDTSAMTVYMELRSLRSDDTAVYYCVRERSGGFWDYWGQGSLVTVSS

SEQ ID NO: 23585 - protein, 94 aa, Homo sapiens
SGYTFTTYYLHWMRQAPGQGLEWMGTIRPSGGGTVYAQKLQGRVTMTRDTSTSTVYMDLSSLRSEDTAVYYCVRERSGGFWDYWGQGTLVTVSS

SEQ ID NO: 23586 - protein, 96 aa, Homo sapiens
ASGYTFTSYYMHWVRQAPGQGLEWMGIINPSGDTTTYAQKFQDRVTMTRDTSTRTVYMELSSLKSEDTAVYYCARGAAAGRALDYWGQGTLVTVSS

SEQ ID NO: 23587 - protein, 96 aa, Homo sapiens
ASGYTFTNYYMHWVRQAPGQGLEWMGLINPSGDTTSYAQKFQDRVTMTRDTSTSTVYLDLSSLRSEDTAVYYCARGAAAGRALDYWGQGTLVTVSS

SEQ ID NO: 23588 - protein, 96 aa, Homo sapiens
ASGYTFTNYAIHWVRQAPGQRLEWMGWINAANGNTKYSQKFRGRVTITRDTSASTVYMDLRSLTSEDTSVYYCASLSRDGYNSDYWGQGTLVTVSS

SEQ ID NO: 23589 - protein, 96 aa, Homo sapiens; identical to SEQ ID NO: 23588

SEQ ID NO: 23590 - protein, 96 aa, Homo sapiens
ASGYTFTNYAIHWVRQAPGQRLEWMGWINAGNGNTKYSQKLQGRVTITRDTSASTAYMELSSLRSEDTAVYFCASLSRDGYNSDYWGQGTLVTVSS

SEQ ID NO: 23591 - protein, 96 aa, Homo sapiens
ASGYSFTNYAIHWVRQAPGQRLEWMGWINVGNGNTKYSQKLQGRVTITRDTSATTVYMELTSLRSEDTAVYFCASLSRDGYNSDYWGQGTLVTVSS

SEQ ID NO: 23592 - protein, 96 aa, Homo sapiens; identical to SEQ ID NO: 23590

SEQ ID NO: 23593 - protein, 96 aa, Homo sapiens
ASGHTFSNYAMHWVRQAPGQRLEWMGWINTGNGNTKYSQKFQGRVTITRDTSASTVYMELSSLRSEDTAVYFCASLSRDGYNSDYWGQGTLVTVSS

SEQ ID NO: 23594 - protein, 97 aa, Homo sapiens
AASGFSVSDIYTTWVRQAPGKGLEWVSVIYTGGSTYYADSVKGRFTISRDISKNTLYLQMNSLRAEDTAVYYCARAYNNYVYYFDYWGQGTLVTVSS

SEQ ID NO: 23595 - protein, 97 aa, Homo sapiens
AASGFSVTNNYMIWVRQAPGKGLEWVSVIYSGGGTYYADSVKGRFTISRDNSKNTLHLQMNSLRVEDTAVYYCARAYNNYVYYFDYWGQGTLVTVSS

SEQ ID NO: 23596 - protein, 98 aa, Homo sapiens
AASGFSFSNAWMTWVRQAPGKGLEWVGRIEGKTDGETTAYAAPVKGRFTISRDASKDTLYLQMNSLKIEDTAVYYCTTQFNWNDGDHWGQGTLVTVSS

SEQ ID NO: 23597 - protein, 98 aa, Homo sapiens
AASGFTFSNAWMTWVRQAPGKGLEWVGLIKTKNDGVTTHYGAPVKGRFTISRDDSRSTLYLQMNSLKTEDMAVYYCTTQFNWNDGDHWGQGALVIVSS

SEQ ID NO: 23598 - protein, 96 aa, Homo sapiens
AASGIPFNSSGMHWVRQAPGKGLEWVAMIWSDGSNDFYADSVKGRFSISRDNLKNTLYLQMNSLRAEDTAMYYCARDKGVTSIDQWGQGTLVTVSS

SEQ ID NO: 23599 - protein, 96 aa, Homo sapiens
AASGIPFSSSGMHWVRQAPGKGLEWVAFIWSDGSKTYYTDSVKGRFTISRDNSNNMVYLQMNSLRAEDTAVYYCARDKGVTSIDQWGQGTLVTVSS

SEQ ID NO: 23600 - protein, 99 aa, Homo sapiens
SGYTFTSQYLHWVRQAPGQGLEWMGIINPTGGNSNYAQKFRGRVTMTRDTSTSTVYMELSSLTSEDTALYYCARGKEYSGYQEYYFDYWGQGTLVTVSS

SEQ ID NO: 23601 - protein, 99 aa, Homo sapiens
SGYTFTSYYVNWVRQAPGQGLEWMGIVNPTSGSASLAQKFQGRVTMTRDRSTATMYMELSSLRSEDTAVYYCARGKEYSGYQEYYFDYWGQGTLVTVSS

SEQ ID NO: 23602 - protein, 98 aa, Homo sapiens
TVSGGSISRSSYYWGWIRQPPGKGLEWIGGIYYSGKTYYNPSLKSRVTIFVDTSKNQFSLKLNSVTAADTAVYFCARRGSENYWIDYWGQGTLVTVSS

SEQ ID NO: 23603 - protein, 98 aa, Homo sapiens
TVSGGSISRSSYYWGWIRQPPGKGLEWIGSIYYSGKTYYNPSLKSRVTISVDTSKNQFSLKLNSVTAADTAVYYCARRGSENYWIDYWGQGTLVTVSS

SEQ ID NO: 23604 - protein, 98 aa, Homo sapiens
TVSGGSISSSTYYWGWIRQPPGKGLEWIGSIHYSGKTYYNPSLKSRVTISVDTSKNQFSLRLNSVTAADTAVYYCARRGSENYWIDYWGQGTLVTVSS

SEQ ID NO: 23605 - protein, 97 aa, Homo sapiens
TVSGGSISSSYYWGWIRQPPGKGLEWIGSIHYSGKTYYNPSLKSRVTISVDTSKNQFSLKLNSVTAADTAVYYCARRGSENYWIDYWGQGTLVTVSS

SEQ ID NO: 23606 - protein, 98 aa, Homo sapiens
SVSGGSIDSSNYYWGWIRQPPGKGLEWIGSIHYSGKTYYNPSLKSRVTISVDTSKNQFSLKLNSVTAADTAVYYCARRGSENYWIDYWGRGTLVTVSS

SEQ ID NO: 23607 - protein, 98 aa, Homo sapiens
TVSGGSISSSNYYWGWIRQPPGKGLEWIGSIYYSGKTYYNPSLKSRVTISVDTSKNQFSLKLSSVTAADTAVYYCARRGSENYWIDYWGQGTLVTVSS

SEQ ID NO: 23608 - protein, 98 aa, Homo sapiens
TVSGGSISYSNYYWGWIRQPPGKGLEWIGSINYRGITYYNPSLKSRVAISVDTSKNQFSLKLSSVAAADTAVYYCARRGSENYWIDYWGQGTLVTVSS

SEQ ID NO: 23609 - protein, 98 aa, Homo sapiens
TVSGGSISSSNYYWGWIRQPPGKGLEWIGSIYYSGNTYYNPSLKSRVTISVDTSKNQFSLKLNSVTAADTAVYYCARRGSENYWIDYWGQGTLVTVSS

SEQ ID NO: 23610 - protein, 98 aa, Homo sapiens
TVSGGSIGSSSYYWGWIRQPPGKGLEWIGSIYYSGKTYYNPSLKSRVTISVDTSKNQFSLKLNSVTAADTAVYYCARRGSENYWIDYWGQGTLVTVSS

SEQ ID NO: 23611 - protein, 95 aa, Homo sapiens
AASGFTFRVYSMNWVRQAPGKGQEWISYMTSDMRTIHYADSVKGRFTISRDNDNYSLYLQLNNLRDEDTAVYYCVRSVAGAFDYWGQGTLVTVSS

SEQ ID NO: 23612 - protein, 94 aa, Homo sapiens
AASGFSFSIYSMNWVRQAPGKGLEWVSHMTSDERTIHYADSVKGRFTISRNNARRSVYLQMNSLRAEDTAVYYCVRSVAGAFDYWGQGTQVTVS

SEQ ID NO: 23613 - protein, 99 aa, Homo sapiens
AVSGFSFSSYWMHWVRQAPGKGLVWVSRINTDGSSRTYADSVKGRFTVSRDNSKNTLYLQMNSLRAEDTAVYYCARGAAPGISGWVDPWGQGTLVTVSS

SEQ ID NO: 23614 - protein, 99 aa, Homo sapiens; identical to SEQ ID NO: 23613

SEQ ID NO: 23615 - protein, 99 aa, Homo sapiens
AASGFTFSSYWMHWVRQAPGKGLVWVSRINTDGSSTNYADSVKGRFTISRDNAKNTLYLQLNSLRDEDTAVYFCARGAAPGISGWVDPWGQGTLVSVSS

SEQ ID NO: 23616 - protein, 94 aa, Homo sapiens
ASGYNFTNNGIYWVRQAPGQGLEWMGWINTISGTPIYAQDFTGRYVFSLDSSVSTAYLQISSLKPEDTAVYFCARGTRGDFDYWGQGTLVIVSS

SEQ ID NO: 23617 - protein, 94 aa, Homo sapiens
ASGYNFSDNGIYWVRQAPGQGLEWMGWINTKTGNPTYAQGFTGRFVFSLDTSVSTAYLQISSLKAEDTAVFYCARGTRGDFDYWGQGTLVTVSS

SEQ ID NO: 23618 - protein, 94 aa, Homo sapiens; identical to SEQ ID NO: 23617

SEQ ID NO: 23619 - protein, 94 aa, Homo sapiens
ASGYNFSDNGIYWVRQAPGQGLEWMGWINTKTGNPTYAQGFTGRFVFSLDTSVSTAYLQISSLMADDTAVFYCARGTRGDFDYWGQGTLVTVSS

SEQ ID NO: 23620 - protein, 94 aa, Homo sapiens; identical to SEQ ID NO: 23617

SEQ ID NO: 23621 - protein, 98 aa, Homo sapiens
ASGYTFTSYAMNWVRQAPGQRLEWMGWINTNTGNPTYAQGFTGRFVFSLDTSVSTAYLQISSLKAEDTAVYYCARGTAVAGTDWLDPWGQGTLVTVSS

SEQ ID NO: 23622 - protein, 98 aa, Homo sapiens
ASGYTFTNYAMNWVRQAPGQRLEWMGWINTNTGKPTYAQGFTGRFVFSLDTSVSTAYLQINSLKAEDTAVYYCARGTAVAGTDWLDPWGQGSLVTVSS

SEQ ID NO: 23623 - protein, 98 aa, Homo sapiens
ASGYTFSTYAMNWVRQAPGQGLEWMGWINTNTGNPTYAQGFTGRFVFSLDTSVSTAYLLISSLKAEDTAVYYCARGTAVAGTDWLDPWGQGTQVTVSS

SEQ ID NO: 23624 - protein, 93 aa, Homo sapiens
ASGYSLTNNGVGWVRQVPGKGLEWMGWINTHSGNAAYAQGFTGRFVFSLDTSLNTAYLQINSLRTDDTAIYYCAREPRRLDYWGQGTLVTVSS

SEQ ID NO: 23625 - protein, 93 aa, Homo sapiens
ASGYSLSSFGMCWVRQAPGQGLEWLGWINTHTGHPQYVQALAGRIAFSFDTSVNTAYLEINYLRADDTAVYYCAREPRRLDYWGQGTLVTVSS

SEQ ID NO: 23626 - protein, 100 aa, Homo sapiens
AASGFSFSDYGIHWVRQAPGKGLEWVAAVWYDGSKTYYGDSVKGRFTISRDISKNTAFLQLNSLRVEDTAAYYCARGAAYYDSSGHPDYWGQGTLVTVSS

SEQ ID NO: 23627 - protein, 100 aa, Homo sapiens
GVSGFSFSDYGIHWVRQAPDKGLEWVAVIWYGGSKKFYRDSVKGRFTISRDTSENTMYLQMNSLRPEDTAVYYCARGAAYYDSSGHPDYWGPGTLVTVSS

SEQ ID NO: 23628 - protein, 100 aa, Homo sapiens
GVSGFSFSDHGIHWVRQAPDKGLEWVAVIWYGGSKKFYRDSVKGRFTISRDTSENTMYLQMNSLRPEDTAVYYCARGAAYYDSSGHPDYWGPGTLVTVSS

SEQ ID NO: 23629 - protein, 105 aa, Homo sapiens
AASGFTFSSYGMHWVRQAPGKGLEWVAVIWYDGSNKYYGDSVKGRFTISRDNSKNTLNLQLNSLRVEDTAVYYCARDRVTMVRGEAYHYYGMDVWGQGTTVTVSS

SEQ ID NO: 23630 - protein, 105 aa, Homo sapiens
AASGFTFTKYGMHWVRQAPGKGLEWVAVIWYDGSNKKYASSVKGRFTISRDNSKNTLYMQMNSLRAEDTAVYYCARDRVTMVRGEAYHYYGMDVWGQGTTVTVSS

SEQ ID NO: 23631 - protein, 105 aa, Homo sapiens
AASGFTFSSYGMHWVRQAPGKGLEWVAVIWYDGSNKYYADSVKGRFTISRDNSRNTLYLQMNSLRAGDTAVYYCARDRVTMVRGEAYHYYGMDVWGQGTTVTVSS

SEQ ID NO: 23632 - protein, 97 aa, Homo sapiens
TVSGDSISGYYWTWIRQSPGKGLEWIGYIHYRGSTNYNPSLKSRVTISLDTSKSQVSLMLRFVTAADTAVYYCARGWRGYSYGFDYWGQGNLVTVSS

SEQ ID NO: 23633 - protein, 97 aa, Homo sapiens
TVSGGSISSYYWSWIRQPPGKGLEWIGYIHYSGSTNYNSSLKSRVTISVDTSRNLFSLKLSSVTAADTAVYYCARGWRGYSYGFDYWGQGTLVTVSS

SEQ ID NO: 23634 - protein, 95 aa, Homo sapiens
TVSGASIRSYYWTWIRQPPGKGLEWIGYIYYGGSTNYNPSLKSRVTISLDTFKDQFSLKLTSVTAADTAVYYCASGIVGANGAYWGQGTLVTVSS

SEQ ID NO: 23635 - protein, 95 aa, Homo sapiens
TVSGGSINDYYWSWIRQSPGKGLEWIGYIYYTGSTKYNPSLKSRVTISLDTSKSQFSLKLSSVTAADTAVYYCASGIVGANGAYWGQGTLVTVSS

SEQ ID NO: 23636 - protein, 94 aa, Homo sapiens
TVSGFTFGDYAMSWFRQAPGKGLEWVGFIRSKAYGGTPEYAASVKGRFSFSRDDSKSIAYLQMNSLKIEDTAVYYCTRSLFDYWGQGTLVTVSS

SEQ ID NO: 23637 - protein, 94 aa, Homo sapiens
KTSGFTFGEYAMTWVRQAPGKGLEWVGFIRSKAYDETTEYAASVKGRFIFSRDDSKSIAYLQMNSLRTEDTAVYFCTRSLFDYWGQGTLVTVSS

SEQ ID NO: 23638 - protein, 96 aa, Homo sapiens
AAPGFTFSNAWMSWVRQAPGKGLEWVGRIKSKTDGGTTDYAAPVKGRFTISRDESKNTLYLQMNSLKTEDTAVYYCTTDRGAAPDWGQGTLVIVSS

SEQ ID NO: 23639 - protein, 96 aa, Homo sapiens
AASGLTFSNAWMSWVRQAPGKGLEWVGRIQSKTDGGTTDSAAPVKGRFTISRDDSKNTLYLQMNSLKTEDTAIYYCTTDRGAAPDWGQGTLVTVSS

SEQ ID NO: 23640 - protein, 100 aa, Homo sapiens
AASGFTFSSYAMSWVRQAPGKGLEWVSAISGSGGSTYYADSVKGRFTISRDNSKNTLYLQMNSLRAEDTAVYYCAKGVNTYSYYYGMDVWGQGTTVTVSS

SEQ ID NO: 23641 - protein, 100 aa, Homo sapiens
AASGFTFSSFGMSWVRQAPGKGLEWVSTISGSGGSTYYAESVKGRFAISRDNSKNTLYLQMNSLRAEDTAIYYCAKGVNTYSYYYGMDVWGQGTTVTVSS

SEQ ID NO: 23642 - protein, 97 aa, Homo sapiens
AASGFTFSSYGMHWVRQAPGKGLQWVATIWYDGSKKYYSDSVKGRFTISRDNSKYVLYLQMNTLRAEDTAVYYCARGRSSSWDTDYWGQGTLVTVSS

SEQ ID NO: 23643 - protein, 97 aa, Homo sapiens
AASGFTFSNYGMHWVRQAPGKGLEWVAAIWYDGSKKFYVESVKGRFTISRDNSKNTMYLQLNSLSVEDTAVYYCARGRSSSWDTDYWGQGTLVTVSS

SEQ ID NO: 23644 - protein, 97 aa, Homo sapiens
AASGFTFSNYGMHWVRQAPGKGLQWVATIWYDGSKKYYSDSVKGRFTISRDNSKYVLYLQMNTLRAEDTAVYYCARGRSSSWDTDYWGQGTLVTVSS

SEQ ID NO: 23645 - protein, 96 aa, Homo sapiens
AASGFTFSSYGMHWVRQAPGKGLQWVATIWYDGSKKYYSDSVKGRFTISRDNSKYVLYLQMNTLRAEDTAVYYCARGRSSSWDTDYWGQGTLVTVS

SEQ ID NO: 23646 - protein, 97 aa, Homo sapiens
AASGFTFSSYGMHWVRQAPGKGLQWVATIWYDGSKKYYSDSVKGRFTISRDNSKYALYLQMNTLRAEDTAVYYCARGRSSSWDTDYWGQGTLVTVSS

SEQ ID NO: 23647 - protein, 96 aa, Homo sapiens
ASGFTFSSYWMHWVRQVPGKGLVWVSLIDGIGTTTFYADSVKGRFTISRDNVKNTLYLQMNSLTAEDTAVYYCARDDDGRKPLDYWGQGTLVTVSS

SEQ ID NO: 23648 - protein, 96 aa, Homo sapiens
VSGFIFTSYWMHWVRQVPGKGLVWVSGMDPDGTDIRYADSVKGRFTISRDNAKNTLYLQMNSLRVEDTAVYYCARDDDGRKPLDYWGQGTLVTVSS

SEQ ID NO: 23649 - protein, 95 aa, Homo sapiens
AASGFTFSTNWMHWVRQAPGKGLVVVSLIRHDGSSPYYADSVKGRFTISRDNARNTLYLQMNSLRAEDSAVYYCARDYYYSIESWGQGTLVTVSS

SEQ ID NO: 23650 - protein, 95 aa, Homo sapiens
AASGFPFSTNWMHWVRQAPGKGLVWVSHITSDGSRTDYADSVKGRFTISRDNAKHTLYLQMNSLRAEDTAVYYCARDYYYSIESWGQGTLVTVSS

SEQ ID NO: 23651 - protein, 93 aa, Homo sapiens
ASGYTFTNHGMQWVRQAPGQGLEWMGWINVDNGETTQSQKFQGRVTITSDTSATTAYMELNSLTSEDTAVYYCARHGAGMDVWGPGTTVTVSS

SEQ ID NO: 23652 - protein, 93 aa, Homo sapiens
ASGYTFTRNGMQWVRQAPGQRLEWMGWIDAGNGETVYSQKFQDRVTLTRDTSASTAYMELSSLTSEDTAVYYCARHGAGMDVWGQGSAVMVSS

SEQ ID NO: 23653 - protein, 95 aa, Homo sapiens
AVYGGSFSGYYCTWIRQPPGKGLEWIGEINLRGSTNYNPSLKSRVTISLDTSKNQFSLKLSSVTAADTAVYYCARGDIAARMGYWGQGTLVTVSS

SEQ ID NO: 23654 - protein, 95 aa, Homo sapiens
AVYGGSFSGYYWSWIRQPPGKGLEWIGEINHSGSTNYNPSLKSRVTISVDTSKNQFSLKLNSVTAADTAVYYCARGDIAARMGYWGQGTLVTVSS

SEQ ID NO: 23655 - protein, 100 aa, Homo sapiens
ATSGFTFTSYGIHWVRQAPGKGLEWVAVMWYDGINKYYADSVKGRFTVSRDNSKSTVYLQMNSLRAEDTAVYYCARDVDTTSHYGRFDPWGQGALVTVSS

SEQ ID NO: 23656 - protein, 100 aa, Homo sapiens
AASGFIFNHYGMHWVRQAPGKGLEWVAVLWSNGKDKYYADSVKGRFTISRDSFKNTVYLQMNRLSDEDTAVYYCARDVDTTSHYGRFDPWGQGTRVTVSS

SEQ ID NO: 23657 - protein, 100 aa, Homo sapiens
ATSGFTFSHYGMHWVRQAPGKGLEWVAVVWSDGTRTNYADSVKGRFTISRDISESTVYLQMNSLRADDTAVYSCARDVDTTSHYGRFDPWGQGTLVTVSS

SEQ ID NO: 23658 - protein, 96 aa, Homo sapiens
AASGFTFDYYWMSWVRQAPGKGLEWVANINEGGSETFYVDSVKGRFTISRDNAKNTLYLQMNSPRVEDTAVYYCARDPDTGTADYWGQGTLVTVSS

SEQ ID NO: 23659 - protein, 96 aa, Homo sapiens
AVSGFTFSSYWMSWVRQAPGKGLEWVANINENGREKYYVDSVEGRFTISRDNAKNSLYLQMNSLRVEDMAVYFCARDPDTGTADYWGQGTLVTVSS

SEQ ID NO: 23660 - protein, 91 aa, Homo sapiens
AVSGFDFSNFPMNWVRQSPERGLEWVAYITKTGDETYYADSVKGRFTVSRDNARSSLFLQMNSLRDEDTAIYYCTTWSDYWGQGTLVTVSS

SEQ ID NO: 23661 - protein, 91 aa, Homo sapiens
AVSGFTFSDFPMNWVRQTPGKGLQWLAYISRDGDDIFYADSVKGRFTISRDNAKSSLYLELNSLGKDDTGIYYCTTWSDYWGQGTLVTVSS

SEQ ID NO: 23662 - protein, 97 aa, Homo sapiens
AASGFNFSNCWMGWVRQAPGKGLEWVAYIKEDGGQKFYVDSVMGRFTISRDNAKSSLYVQMNSLRAEDAAVYYCVRDRGGRSGMDVWGQGTTVTVSS

SEQ ID NO: 23663 - protein, 97 aa, Homo sapiens
EASGFTFWTYWMGWVRQAPGQGLEWVAWIKEDGGEKFYVDSVEGRFTISRDNAKNSMFLQMNSLIDEDTAVYYCVRDRGGRSGMDVWGQGTTVVVSS

SEQ ID NO: 23664 - protein, 97 aa, Homo sapiens
EASGFSFWTYWMGWVRQAPGQGLEWVTYIKEDGDEKHYVDSVKGRFTISRDNAKNSLFLQMNSLIDEDTAVYYCVRDRGGRSGMDVWGQGTTVIVSS

SEQ ID NO: 23665 - protein, 97 aa, Homo sapiens
AASGFPFSDHWMGWVRQAPGMGLEWVAYLKEDGGQRHFVDSVKGRFTISRDNAKKALYLQMNSLTVEDTAVYFCVRDRGGRSGMDVWGQGTTVIVSS

SEQ ID NO: 23666 - protein, 96 aa, Homo sapiens
AASGFTFSDYWMGCVRQAPGKGLEWVAYIKEDGGEKYYVDSVKGRFTITRDNAQNSLFLQMNSLRAEDTAVYYCVRDRGGRSGMDVWGQGTTVTVS

SEQ ID NO: 23667 - protein, 100 aa, Homo sapiens
AASGFTFSSFAMTWVRQAPREGLEWVSAISDSGGAIYYADSVRGRFSISRDNSKNTLYLQMNSLRAEDTAVYYCATLYDFWSGYGGMDVWGQGTTVTVSS

SEQ ID NO: 23668 - protein, 100 aa, Homo sapiens
AASGFTFSNFAMTWVRQTPGKGLEWVSGINDIGGSTKYADSVKGRFTISRDNSKNMLYLQMNSLRAEDTAVYHCATLYDFWSGYGGMDVWGQGTTVTVSS

SEQ ID NO: 23669 - protein, 96 aa, Homo sapiens
AASGFTSSSYAMSWVRQAPGKGLEWVSAISGSGGSTYYADSVKGRFTISRDNSKNTLYLQLNSLRAEDTAVYYCAKGGVTAPFDYWGQGTLVTVSS

SEQ ID NO: 23670 - protein, 96 aa, Homo sapiens
AASGFTFSSYAMSWVRQAPGKGLEWVSLIYSVDTSTYYADSVKGRFTISRDNSRNTLYLQMNSLRAEDTAVYYCAKGGVTAPFDYWGQGTLVTVSS

SEQ ID NO: 23671 - protein, 98 aa, Homo sapiens
ASGYIFTSFAIQWVRQAPGQRLEWMGWINAGNANTKYSEKFQGRVTITRDTSATTAYMELSSLKSEDTAVYYCAREHDTLTGYGFDIWGQGTKVTVSS

SEQ ID NO: 23672 - protein, 97 aa, Homo sapiens
SGFTFTTYAIQWVRQAPGQGLEWMAWINAGNGNIRYSQKFQGRIIITRDTSASTAYMDLSSLRSEDTAVYFCAREHDTLTGYGFDIWGQGTMVTVSS

SEQ ID NO: 23673 - protein, 97 aa, Homo sapiens
SGFTFTMYAIHWVRQAPGQGLEWMAWINAGNGNIRYSQKFQGRLIITRDTSASTAYMDLSSLRSEDTAVYFCAREHDTLTGYGFDIWGQGTMVTVSS

SEQ ID NO: 23674 - protein, 97 aa, Homo sapiens
SGFTFTTYAIQWVRQAPGQGLEWMAWINAGNGNTRYSQKFQGRLLITRDTSASTAYMDLSSLRSEDTAVYFCAREHDTLTGYGFDIWGQGTVVTVSS

SEQ ID NO: 23675 - protein, 98 aa, Homo sapiens; identical to SEQ ID NO: 23671

SEQ ID NO: 23676 - protein, 95 aa, Homo sapiens
AASGFTFSTYWMHWVRQVPGKGLVWVSRMNEDGSTTNYADSVKGRFIISRDNSKGTLYLQMNSLRVEDTAVYYCARDLSGRFDYWGQGTLVTVSS

SEQ ID NO: 23677 - protein, 95 aa, Homo sapiens
VASGFSLSSYWMHWVRQVPGKGLVWVSRIDENGRTVDYADSVEGRFTISRDNAKNTLFLQMSGLRAEDTAVYFCARDLSGRFDYWGQGTLVTVSS

SEQ ID NO: 23678 - protein, 100 aa, Homo sapiens
IVSGGSISGYYWSWIRQPPGKGLEYIGYMSYSGSTNYNPSLRSRVTISVDRSKSQFSLKLRSVTAADTAVYYCARASADLPYYYYGMDVWGQGTTVTVSS

SEQ ID NO: 23679 - protein, 100 aa, Homo sapiens; identical to SEQ ID NO: 23678

SEQ ID NO: 23680 - protein, 100 aa, Homo sapiens
TVSGGSISSYYWTWIRQPPGKGLEWIGYMSYSGSTNYNPSLKSRVTISVDTSKNQFSLKLSSVTAADTAVYYCARASADLPYYYYGMDVWGQGTTVTVSS

SEQ ID NO: 23681 - protein, 100 aa, Homo sapiens
TVSGGSISSYYWSWIRQPPEKGLEWIGYMSYSGSTNYNPSLKSRVIISVDTSKNQFSLKLSSVTAADTAMYYCARASADLPYYYYGMDVWGQGTTVTVSS

SEQ ID NO: 23682 - protein, 100 aa, Homo sapiens
IVSGGSISGYYWSWIRQPPGKGLEWIGYISYSGSTNYNLSLKSRVTISLDTSKNQFSLKLTSVTAADTAVYFCARASADLPYYYYGMDVWGQGTTVTVSS

SEQ ID NO: 23683 - protein, 100 aa, Homo sapiens
TVSGGSISGYYWSWIRQPPGKGLESVGYISYSGSTNYNPSLKSRVTISLDTSKNQFSLKLSSVTAADTALYYCARASADLPYYYYGMDVWGQGTTVTVSS

SEQ ID NO: 23684 - protein, 93 aa, Homo sapiens
AASGFTFSKFFMSWVRHVPGKGLEWVANMNEDGSVKLYVDSVRGRFTISRDNAQNSVYLQMNSLRADDTGFYYCANGVRGGFWGQGTLVTVSS

SEQ ID NO: 23685 - protein, 92 aa, Homo sapiens
ASGFTFRRSWMSWVRQAPGKGLEWVANMKEDGTVTLYADSVKGRFTISRDNAKNSLYLQMNSLRAEDTSVYFCANGVRGGFWGQGTLVTVSS

SEQ ID NO: 23686 - protein, 92 aa, Homo sapiens; identical to SEQ ID NO: 23685

SEQ ID NO: 23687 - protein, 95 aa, Homo sapiens
VASGFGFTYNAMAWVRQAPGQGLEWVAGIGGDVRTHYRGSVKGRFIISRDNSKNMLYLQMNSLRVEDTGVYYCAKDILGWTFDHWGQGTLVTVSS

SEQ ID NO: 23688 - protein, 95 aa, Homo sapiens
AASGFDFGPNAMAWVRQAPGKGLEWVSGSGGDGNKLYADSVKGRFTISRDNSKNMLYLQMNSLRAEDTAVYYCAKDILGWTFDHWGQGIQVTVSS

SEQ ID NO: 23689 - protein, 95 aa, Homo sapiens
EASGFDFGPNAMAWVRQAPGKGLEWVSGSGGDGNKLYADSVKGRFTISRDISKNMLYLQMNSLRPEDTAVYYCAKDILGWTFDHWGQGILVTVSS

SEQ ID NO: 23690 - protein, 95 aa, Homo sapiens
AASGLDFGPNAMAWVRQAPGKGLEWVSGSGGDGNKLYADSVKGRFTISRDNSKNMLYLQMNSLRAEDTAVYYCAKDILGWTFDHWGQGIQVTVSS

SEQ ID NO: 23691 - protein, 95 aa, Homo sapiens; identical to SEQ ID NO: 23689

SEQ ID NO: 23692 - protein, 95 aa, Homo sapiens; identical to SEQ ID NO: 23689

SEQ ID NO: 23693 - protein, 95 aa, Homo sapiens; identical to SEQ ID NO: 23689

SEQ ID NO: 23694 - protein, 95 aa, Homo sapiens
EASGFDFGPNAMAWVRQAPRKGLEWVSGSGGDGNKLYADSVKGRFTISRDISKNMLYLQMNSLRPEDTAVYYCAKDILGWTFDHWGQGILVTVSS

SEQ ID NO: 23695 - protein, 95 aa, Homo sapiens
EASGFDFGPNAMAWVRQAPGKGLEWISGSGGDGNKLYADSVKGRFTISRDISKNMLYLQMNSLRPEDTAVYYCAKDILGWTFDHWGQGILVTVSS

SEQ ID NO: 23696 - protein, 95 aa, Homo sapiens
EASGFDFGPNAMAWVRQAPGKGLEWVSGSGGDGNKLYADSVKGRFTISRDISKNMLYLQINSLRPEDTAVYYCAKDILGWTFDHWGQGILVTVSS

SEQ ID NO: 23697 - protein, 95 aa, Homo sapiens
EASGFDFGPNAMAWVHQAPGKGLEWVSGSGGDGNKLYADSVKGRFTISRDISKNMLYLQMNSLRPEDTAVYYCAKDILGWTFDHWGQGILVTVSS

SEQ ID NO: 23698 - protein, 93 aa, Homo sapiens
ASGFIFSVYNMNWVRQAPGKGLEWVSFISGSGNYIFYVDSVKGRFTISRDNANNSVYLQMNSLRAEDTAVYYCARDRGVSDYWGQGTLVTVSS

SEQ ID NO: 23699 - protein, 93 aa, Homo sapiens
AASGFTFSSYNMNWVRQAPGKGLEWVSSIISSRYIYYADSVKGRFTISRDNAKNSLYLQMNSLRAEDTAVYYCARDRGVSDYWGQGTLVTVSS

SEQ ID NO: 23700 - protein, 99 aa, Homo sapiens
AVSGFSFTNYGLHWVRQAPGKGLEWVAVVWYDGSTKFYVDSVKGRFTISTDHSKNIVYLQMNSLRAEDTAVYYCARDASGGDWRYFDYWGQGSLVTVSS

SEQ ID NO: 23701 - protein, 99 aa, Homo sapiens
AASGFSFSDYGMHWVRQAPGKGLEWLARIWYDGSNEYYADSLKGRFTISRDNSKNTVYLQMNSLRAEDTAIYYCARDASGGDWRYFDYWGQGILVTVSS

SEQ ID NO: 23702 - protein, 99 aa, Homo sapiens
AASGFSFSDYGMHWVRQAPGKGLEWLARIWYDGSNEYYADSLKGRFTISRDNSKNTLYLQMNSLRVEDTGIYYCARDASGGDWRYFDYWGQGILVTVSS

SEQ ID NO: 23703 - protein, 99 aa, Homo sapiens
VASGFSFSDYGMHWVRQAPGKGLEWLARIWYDGSNEYYADSLKGRFTISRDNSKNTVHLQMNSLRAEDTAIYYCARDASGGDWRYFDYWGQGILVTVSS

SEQ ID NO: 23704 - protein, 99 aa, Homo sapiens; identical to SEQ ID NO: 23703

SEQ ID NO: 23705 - protein, 99 aa, Homo sapiens
AVSGFSLRNYGLHWVRQAPGKRLEWVAVVWFDGSTKFYGDSVKGRFAISTDHSKNIAYLQMNSLRAGDTAVYYCARDASGGDWRYFDYWGQGSLVTVSS

SEQ ID NO: 23706 - protein, 93 aa, Homo sapiens
ASGYTFTPYGIHWVRQAPGQGLEWMGWINADNGHTGYSQEFQGRVTITRDTSATTAYMELSSLRSEDTAMYYCARGAIGFDHWGQGTLVTVSS

SEQ ID NO: 23707 - protein, 92 aa, Homo sapiens
SGYTFTNYAIHWVRQAPGQRLEWMGWINGGDGYTKYSQKFQGRVTIINDTPASTAYLELNSLRSEDTAVYYCARGAIGFDHWGQGTLVTVSS

SEQ ID NO: 23708 - protein, 100 aa, Homo sapiens
TVSGNSLTSGSYYWSWIRQPPGKGLEWIGYIYYSGSTKYNPSLKSRVTISVDTSKNQFSLKLSSVTAADTAVYYCARDRGRDGYNKFDYWGQGTLVTVSS

SEQ ID NO: 23709 - protein, 100 aa, Homo sapiens
TVSGDSVTSGSYYWSWIRQPPGKELEWIGYVYYAGSTYYNPSLKSRVTISIDTSKNVFFLKLSSVTAADTAVYYCARDRGRDGYNKFDYWGQGTLVTVSS

SEQ ID NO: 23710 - protein, 90 aa, Homo sapiens
AVYGGSFSGYYWSWIRQPPGKGLEWIGEINHSGSTNYNPSLKSRVTISLDTSKNQFSLKLSSMTAADTAVYYCARGGDSWGQGTLVTVSS

SEQ ID NO: 23711 - protein, 89 aa, Homo sapiens
VYGGSLSGYYWSWIRQPPGKGLEWIGEINHSGSTNYSPSLKSRLTISIDTSKKQFSLKLRSVTAADTAIYYCARGGDSWGQGTLVTVSS

SEQ ID NO: 23712 - protein, 93 aa, Homo sapiens
TVSTASLSNYYWTWIRQSPGKGLEWIGYIHFSGSTNYNSSLKSRVTILVDTSKNQFSLKLSSVTAADTAVYYCAGGNGYNLYWGQGIQVTVPS

SEQ ID NO: 23713 - protein, 93 aa, Homo sapiens
TVSGGSMNTYYWSWIRQPPGKGLEWIADIYYSGSTTYNPSLRSRVTISVDTSKNQFSLKLRSVTAADTAFYYCAGGNGYNLYWGQGTLVTVSS

SEQ ID NO: 23714 - protein, 93 aa, Homo sapiens; identical to SEQ ID NO: 23713

SEQ ID NO: 23715 - protein, 93 aa, Homo sapiens; identical to SEQ ID NO: 23712

SEQ ID NO: 23716 - protein, 93 aa, Homo sapiens
TVSGGSITSSSYYWGWIRQPPGKGLEWIGSMFYSGTTYYNPSLKSRVTISVDTSKNQFSLRLSSVTAADTAVYYCARPFGNYWGRGTLVTVSS

SEQ ID NO: 23717 - protein, 93 aa, Homo sapiens
TVSGGSITSSSYYWGWIRQPPGKGLEWIGTIYYTGGTYYNPSLKSRVTMSVDTSKNQFSLSLTSVTAADTAVYYCARPFGNYWGQGTLVSVSS

SEQ ID NO: 23718 - protein, 98 aa, Homo sapiens
TVSGGSISSSSYYWGWIRQPPGKGLEWIGSIYYSGSTYYNPSLKSRVTISVDTSKNQFSLKLSSVTAADTAVYYCARVKGGSDAFDIWGQGTMVTVSS

SEQ ID NO: 23719 - protein, 98 aa, Homo sapiens
TVSGGSVRSSSYYWGWIRQPPGKGLEWIGTFFYSGSTYYNPSLKSRVTISVDTSKNQFSLKLSSVTAADTAVYYCARVKGGSDAFDIWGQGAMVTVSS

SEQ ID NO: 23720 - protein, 95 aa, Homo sapiens
SGYTFSDYYLQWVRQAPGQGLEWMGTINRSDGRMIYARDFQGRITMTRDTSANTVYMELNSLRSEDTAVYYCARERPESYFFDYWGQGTLVTVSS

SEQ ID NO: 23721 - protein, 96 aa, Homo sapiens
ASGYTFSSYYIHWFRQAPGQGLEWVGIFYLTTGVTKYPPKFQGRVTMTRDTSTSTVYMELSSLTSADTAVYYCARERPESYFFDYWGQGTLVTVSS

SEQ ID NO: 23722 - protein, 96 aa, Homo sapiens
ASGYTFTSYYIHWFRQAPGQGLEWVGIFYLTTSVTKYPQKFQGRVTMTRDTSTSTVYMELSSLTSDDSAVYYCARERPESYFFDYWGQGTLVTVSS

SEQ ID NO: 23723 - protein, 96 aa, Homo sapiens
ASGYTFTSYYIHWFRQAPGQGLEWVGILYLTTSVTKYPQKFQGRVTLTSDTSTSTVYMQLSSLTSDDTAVYYCARERPESYFFDYWGQGTLVTVSS

SEQ ID NO: 23724 - protein, 96 aa, Homo sapiens; identical to SEQ ID NO: 23722

SEQ ID NO: 23725 - protein, 96 aa, Homo sapiens; identical to SEQ ID NO: 23722

SEQ ID NO: 23726 - protein, 96 aa, Homo sapiens
ASGYTFSSYYIHWFRQAPGQGLEWVGIFYLTTGVTKYPPKFQGRVTMTRDTSMSTVYMELSSLTSADTAVYYCARERPESYFFDYWGQGTLVTVSS

SEQ ID NO: 23727 - protein, 96 aa, Homo sapiens; identical to SEQ ID NO: 23722

SEQ ID NO: 23728 - protein, 96 aa, Homo sapiens
ASGYTFTSYYIHWFRQAPGQGLEWVGIFYLTTSVTKYPQKFQGRVTMTRDTSTSTAYMELSSLTSDDSAVYYCARERPESYFFDYWGQGTLVTVSS

SEQ ID NO: 23729 - protein, 95 aa, Homo sapiens
AASRFIFSRYWMSWVRQAPGKGLEWVANIKQDGSEKYYVDSVKGRFTVSRDNAKNSLFLQMNSLGADDTAVYYCARNSGWSFDYWGQGTLVTVSS

SEQ ID NO: 23730 - protein, 95 aa, Homo sapiens
AASGFTFRNYWMTWVRQAPGKGLEWVSNIKPDGSEKYYVDSVKGRFTISRDNAKNSLDLQMNSLRAEDMAVYYCARNSGWSFDYWGQGTLVTVSS

SEQ ID NO: 23731 - protein, 95 aa, Homo sapiens; identical to SEQ ID NO: 23729

SEQ ID NO: 23732 - protein, 94 aa, Homo sapiens
AGSGFTLSNVWMSWVRQAPGKGLEWVGRIKMKTDGDTTDYAAPVKGRFTVSRDDSKNTLYVQMNSLKTEDTAVYYCTNQYFDYWGQGTLVTVSS

SEQ ID NO: 23733 - protein, 94 aa, Homo sapiens
AASGFTFSNAWMNWVRQAPGKGLEWVGRIKRKIDGETTDYAAPVKGSFTISRDDSINTLYLQMSSLKIEDTAVYYCTNQYFDYWGQGTLVTVSS

SEQ ID NO: 23734 - protein, 94 aa, Homo sapiens
AASGFTFSNAWMNWVRQAPGKGLEWVGRIKRKIDGGTTDYAAPVKGSFTISRDDSINTLYLQMSSLKIEDTAVYYCTNQYFDYWGQGTLVTVSS

SEQ ID NO: 23735 - protein, 94 aa, Homo sapiens; identical to SEQ ID NO: 23733

SEQ ID NO: 23736 - protein, 95 aa, Homo sapiens
AASGFTFTSYSMNWVRQAPGKGLEWVAYIYSGSDSIQYADSVKGRFTISRDNAKNSLYLQMNSLRDEDTALYYCARDHHWAFDYWGRGILVTVSS

SEQ ID NO: 23737 - protein, 95 aa, Homo sapiens
AASGFTFSSYSMNWVRQAPGKGLEWVSYISGTYTTIAYADSVKGRFTISRDNAKNSLYLEMSSLRDEDTAVYYCARDHHWAFDYWGQGALVTVSS

SEQ ID NO: 23738 - protein, 98 aa, Homo sapiens
EASGFTFSGYAMHWVRQAPGKGLEWVAIIWSNGSHKYNEDSVKGRFTISRDNSKNTLYLQMNSLRVEDTAVYYCVRDGDSNTWPLDYWGQGTLVTVSS

SEQ ID NO: 23739 - protein, 98 aa, Homo sapiens
VASGFTFRRYGMHWVRQAPGKGLEWVAIIWPDGNVKYNEDSVKGRFTISRDNSKNTLYLQMNSLRVEDTAVYYCVRDGDSNTWPLDYWGQGTLVTVSS

SEQ ID NO: 23740 - protein, 92 aa, Homo sapiens
GASGFTFSSHTMSWVRQAPGKGLEWVSDISGSGDNTYYADSVKGRFTISRDNSENTVFLQMNSLRAEDTALYYCAKGYSSDWGRGTQVTVSS

SEQ ID NO: 23741 - protein, 92 aa, Homo sapiens
AASGFTFSSHTMSWVRQAPGKGLEWVSDISGSGDNTFYADSVKGRFTISRDNSKNTLYLQMNSLRAEDTAVYYCAKGYSSDWGQGTLVTVSS

SEQ ID NO: 23742 - protein, 100 aa, Homo sapiens
AASGFTLTNNAVTWGMSWVRQAPGKGLEWVSAIRSGAGTTVYADSVKGRFTISRDTSKNTLYLEMNSLRAEDTAVYYCAKHGSGWYVDYWGEGTLVTVSS

SEQ ID NO: 23743 - protein, 96 aa, Homo sapiens
AASGFTFTNYAMSWVRQAPGKGLEWVSAVTNNGGRTFYADSVKGRFTISRDNSKNTLSLLMNSLRAEDTAVYYCAKHGSGWYVDYWGQGTLVTVSS

SEQ ID NO: 23744 - protein, 95 aa, Homo sapiens
AASGFTFSNYAMSWVRQAPGKGLEWVSAISGGGGTTYYADSVKGRFTISRDNSKNTLYLQMNSLRAEDTAVYYCAKRQQLVFDYWGQGTLVTVSS

SEQ ID NO: 23745 - protein, 95 aa, Homo sapiens
AASGFSFSTYAMTWVRQAPGKGLEWVSIISGSGASTYYADSVKGRFTISRDNSKNTLNLQMNSLTAEDTAVYYCAKRQQLVFDYWGQGTLVTVSS

SEQ ID NO: 23746 - protein, 96 aa, Homo sapiens
AASGFTFSTYSMNWVRQAPGKGLEWVSYISSSSSTIYYADSVKGRFTISRDNAKNSLYLQMNSLRDEDTAVYYCAREFLYSSGDYWGQGTLVTVSS

SEQ ID NO: 23747 - protein, 96 aa, Homo sapiens
AASGFTFSSYEMNWVRQASGKGLEWIAYISSNARSIYYADSVKGRFTISRDNAKNSLYLQMNSLRAEDTAVYYCAREFLYSSGDYWGQGTLVTVSS

SEQ ID NO: 23748 - protein, 100 aa, Homo sapiens
TVSGGSVSSSTYYWAWIRQPPGMGLEWLGTIYYNGNTYYNPSLKSRISISLDTSKNQFSLKLRSVTAADTAFYYCARRHDYGDSPYFDFWGQGPLVTVSS

SEQ ID NO: 23749 - protein, 99 aa, Homo sapiens
VSGASISSNTYYWGWIRQSPGEGLEWIGSIYYSGSTYYNPSVKSRVTISVDTSKNQFSLRLSSVTAADTAVYYCARRHDYGDSPYFDFWGQGALVTVSS

SEQ ID NO: 23750 - protein, 95 aa, Homo sapiens
VYGGSLGGYWWSWIRQPPGEGLEWIGEIIPGGSANYNPSLKSRVFLSVDASKNQFSLRVTSVTAADTAMFYCARHKRGSNTFDIWDQGAMVIVSS

SEQ ID NO: 23751 - protein, 96 aa, Homo sapiens
AVYDESFSGYYWSWIRQPPGKGLEWIGEIIQSGNTNYNSSLKSRVTISVDTSKNQFSLNLRSVTAADTAVYYCARHKRGSNTFDIWGQGTMVIVSS

SEQ ID NO: 23752 - protein, 96 aa, Homo sapiens
AASGFTFSSYALSWVRQAPGKGLEWVSTITGSGGTTYYADSVKGRFAISRDNSKTTLYLQMSSLRAEDTALYYCAKEGRTYYFDYWGQGTLVTVSS

SEQ ID NO: 23753 - protein, 96 aa, Homo sapiens
AASGFTFSSYAMSWVRQAPGKGLEWVSAISGSGGSTYYADSVKGRFTISRDNSKNTLYLQMNSVRAEDTAVYYCAKEGRTYYFDYWGQGTLVTVSS

SEQ ID NO: 23754 - protein, 94 aa, Homo sapiens
AASGFTFSSYWMSWVRQAPGKGLEWVANIKKDGREKYYVDSVKGRFTISRDNAKNSLYLEMNSLRAEDTAVYYCARGSGAPDNWGQGTLVTVSS

SEQ ID NO: 23755 - protein, 94 aa, Homo sapiens
AASGFSFSSYWMSWVRQAPGKGLEWVANVKQDGIDKYYVDSVKGRFTISRDNAKNSLYLQMNSLRAEDTAVYYCARGSGAPDNWGRGTLVTVSS

SEQ ID NO: 23756 - protein, 94 aa, Homo sapiens; identical to SEQ ID NO: 23754

SEQ ID NO: 23757 - protein, 90 aa, Homo sapiens
SGYTFANYAISWVRQAPGQGLEWMGWISGYNGNTNYAQKFQGRVTMTTDTSTTTAFMELRSLRSDDTAVYYCARGRGVYWGQGTLVSVSS

SEQ ID NO: 23758 - protein, 91 aa, Homo sapiens
ASGFTFVDYFMTWVRQAPGQGLQWMGWISVYSGDASYARQFQGRVIMTRDTSTDTTYLELNNLESDDTAVYYCARGRGVYWGQGTLVTVSS

SEQ ID NO: 23759 - protein, 91 aa, Homo sapiens
ASGYTFANYAISWVRQAPGQGLEWMGWIFAYNGNTNYAQKFQGRVTMTTDTSTTTAFMELRSLRSDDTAVYYCARGRGVYWGQGTLVTVSS

SEQ ID NO: 23760 - protein, 100 aa, Homo sapiens
AASGFTFSTYWMSWVRQAPGKGLEWVANIKQDGSEMYYVDSVKGRFTISRDNAKSSLYLQMNSLRAEDTAVYYCARDLAFTVTHPSFDYWGQGTLVTVSS

SEQ ID NO: 23761 - protein, 100 aa, Homo sapiens; identical to SEQ ID NO: 23760

SEQ ID NO: 23762 - protein, 94 aa, Homo sapiens
AASGFTFSSSGMSWVRQAPGRGLECVSAISVSGSGTDYADSVKGRFTISRDNSKNTVYLQMHSLRTEDTALYYCAKGTTDVDYCGQGTLVTVSS

SEQ ID NO: 23763 - protein, 94 aa, Homo sapiens
AASGFSFRSSGMTWVRQAPGGGLECVSAIGVNADNRDYADSVRGRFTISRDNSKNTLYLQMNSLRVEDTALYFCAKGTTDVDYLGQGTLVTVSS

SEQ ID NO: 23764 - protein, 94 aa, Homo sapiens
VGSGFTFRSTGMTWVRQPPGGGLECVSAIGVNAANTDYADSVRGRFTISRDNSQNTLYLQMNSLRVEDTAVYFCAKGTTDVDYWGQGTLVTVSS

SEQ ID NO: 23765 - protein, 94 aa, Homo sapiens; identical to SEQ ID NO: 23763

SEQ ID NO: 23766 - protein, 94 aa, Homo sapiens
AASGFTFSSSGMSWVRQAPGKGLEWVSAIGVNAGNTDYAGSVKGRFTISRDNSKSTLYVQMNSLRAEDTAVYYCAKGTTDVDYWGQGTLVTVSS

SEQ ID NO: 23767 - protein, 97 aa, Homo sapiens
ASGFSFTTYTINWVRQAPGQGLEWMGWINTDTGKPSYGQGFTGRFVFSWETSVSTAYLQIDNLKAGDSAFYYCVRDSHGGKVHLEYWGQGTLITVSS

SEQ ID NO: 23768 - protein, 97 aa, Homo sapiens; identical to SEQ ID NO: 23767

SEQ ID NO: 23769 - protein, 97 aa, Homo sapiens
ASGYSFTTYTINWVRQAPGQGFEWMGWVNTNTGNPTYAQGFTGRFVFSSDTSVTTAYLQISSLKAEDSAIYYCVRDSHGGKVHLEYWGQGTLVTVSS

SEQ ID NO: 23770 - protein, 97 aa, Homo sapiens
ASGYTFTTYTINWVRQAPGQGFEWMGWVNTDTGKATYAQGFTGRFVFSSDTSVTTAHLQITDLEAEDSAIYFCVRDSHGGKVHLEYWGQGTPVTVSS

SEQ ID NO: 23771 - protein, 97 aa, Homo sapiens; identical to SEQ ID NO: 23770

SEQ ID NO: 23772 - protein, 97 aa, Homo sapiens
ASGYTFTTYTINWVRQAPGQGFEWMGGVNTDTGKATYAQGFTGRFVFSSDTSVTTAHLQITDLEAEDSAIYFCVRDSHGGKVHLEYWGQGTPVTVSS

SEQ ID NO: 23773 - protein, 95 aa, Homo sapiens
AASGFTFSNFWLHWVRQVPGKGLVWVSRINENGRITDYADSVRGRFSISRDNAMDTLYLHMNSLTTDDTAVYYCARDLGGAAGGWGQGTLVTVSS

SEQ ID NO: 23774 - protein, 94 aa, Homo sapiens
AASGFTFSNFWLHWVRQVPGKGLVWVSRINENGRITDYADSVRGRFSISRDNAMDTLYLHMNSLTTDDTAVYCARDLGGAAGGWGQGTLVTVSS

SEQ ID NO: 23775 - protein, 95 aa, Homo sapiens
VASGFTFSNYWMHWVRQAPGKGLVWVSHINRDGTYRNYADSVKGRFTISRDNAKNTLYLHMSGLEVEDMAVYYCARDLGGAAGGWGQGTLVTVSS

SEQ ID NO: 23776 - protein, 96 aa, Homo sapiens
AVFGITSHDHGIHWVRQAPGRGLEWVSGIIWKTGRIDYADSVKGRFTVSKDNSKNSVYLQMNSLRPEDTALYYCTEDLVPGGADVWGQGTPVTVSS

SEQ ID NO: 23777 - protein, 96 aa, Homo sapiens
AASGFTSHDIAIHWVRQTPGKGLEWVSGIFWKSGDSGYADSVKGRFTISRDIAKSSLYLQMNSLRIEDTALYYCTEDLVPGGADVWGQGTAVTVSS

SEQ ID NO: 23778 - protein, 95 aa, Homo sapiens
ASGFTSHDIAIHWVRQTPERGLEWVSAIFWKSGYSGYADSVKGRFTISRDIATSSLYLQMNSLRTEDTALYYCTEDLVPGGADVWGQGTTVTVSS

SEQ ID NO: 23779 - protein, 97 aa, Homo sapiens
TVAGGSLSPYYWAWIRLPPGKGLEWIAYIFHTGTTAYNPSLQSRVTISVDTSKNQFSLALSSVTAADTALYYCARLHYYRSEEFDSWGQGTLVTVSS

SEQ ID NO: 23780 - protein, 97 aa, Homo sapiens
TVSGASVSSYYWSWIRQPPGKRLEWIAYMYYKESSNYNPSLKSRVTISVDPSRNRFSLSLSSVTAADTAVYYCARLHYYRSEEFDSWGQGSLVTVSS

SEQ ID NO: 23781 - protein, 97 aa, Homo sapiens
TVAGGSLSPYYWTWIRQPPGKGLEWIAYIYYTGTTAYNPSLQSRVTISVDTSKNQFSLTLSSVTAADTALYYCARLHYYRSEEFDSWGQGTLVTVSS

SEQ ID NO: 23782 - protein, 97 aa, Homo sapiens
TVSGGSISGYYWSWIRQPPGKGPEWIGYIFSNGGTRYNPSLQSRVTMSVDTSKNQYSLSLSSVTAADTAVYYCARLHYYRSEEFDSWGQGTLVIVSS

SEQ ID NO: 23783 - protein, 97 aa, Homo sapiens
TVSGASISGHYWAWIRQPPGKGLEWIGYIYYIATTNYNPSLQSRVTLSLDTSRNQFSLQLTSVTAADTAVYYCARLHYYRSEEFDSWGQGTLVTVSS

SEQ ID NO: 23784 - protein, 97 aa, Homo sapiens
TVSGGFISPYYWSWIRQPPGKGLEWIGYIHYTGSANYSPSLKSRVTISVDTSKNQFSLKLSSVTAADTAVYYCARLHYYRSEEFDSWGQGTLVTVSS

SEQ ID NO: 23785 - protein, 102 aa, Homo sapiens
KGSGYRFTSLWIGWVRQMPGKGLEWMGIIYPGDSDTSYSPSFQGQVTISVDESISTAYLQWSSLKASDTAMYYCARGYYDSSGNSNWYFDLWGRGTLVTVSS

SEQ ID NO: 23786 - protein, 102 aa, Homo sapiens
KGSGYSFTTLWIGWVRQMPGKGLEWMGIIYPGDSDTKYSPSFQGQVTISADKSISTAYLQWSSLKASDTAIYYCARGYYDSSGNSNWYFDLWGRGTLVTVSS

SEQ ID NO: 23787 - protein, 102 aa, Homo sapiens
KGSGYSFTSLWIGWVRQMPGKGLEWMGIIYPGDSDTKYSPSFQGQVTISADKSISTAYLQWSSLKASDTAIYYCARGYYDSSGNSNWYFDLWGRGTLVTVSS

SEQ ID NO: 23788 - protein, 101 aa, Homo sapiens
AASGFDFDGAWMSWVRQVPGKGLEWVGRITHRADGASTEYASPVRGRFTISRDDSRDTLYLEMNGLKTEDSALYYCTTDLPRSDRYSHDYWGQGALVTVAS

SEQ ID NO: 23789 - protein, 101 aa, Homo sapiens
AASGFDFDGAWMSWVRQVPGKGLEWVGRITHRADGASTEYASPVRGRFTISRDDSRDTLYLEMNGLKTEDSALYYCTTDLPRSDRYSHDYRGQGALVTVAS

SEQ ID NO: 23790 - protein, 101 aa, Homo sapiens
AGSGFTFADAWMSWVRQAPGKGLEWVGRITLQRDGEHTDYATAVRGRFSISRDDSMATHYLQMDGLRIEDTAMYYCTTDLPRSDRYSHDYWGQGTLVTVSS

SEQ ID NO: 23791 - protein, 97 aa, Homo sapiens
AASGFTFSNYAMSWVRQAPGMGLEWVSGISGVGGSTYYADAVKGRFTISRDNSKNTMYLQMNSLRAEDTALYYCAKVPLGTWWFDPWGQGTLVTVSS

SEQ ID NO: 23792 - protein, 97 aa, Homo sapiens
AASGFTFSNFAMCWVRQAPGKGLEWVSGISGGGTSTFYPDSVKGRFAISRDNSKNTLYLQINSLRAEDTAVYYCAKVPLGTWWFDPWGQGTLVTVSS

SEQ ID NO: 23793 - protein, 97 aa, Homo sapiens; identical to SEQ ID NO: 23791

SEQ ID NO: 23794 - protein, 97 aa, Homo sapiens; identical to SEQ ID NO: 23791

SEQ ID NO: 23795 - protein, 98 aa, Homo sapiens
AASGFTFSNYWMSWVRRAPGKGLEWVAAIKQDGSAKYYVDSVKGRFTISRDNAKNSLSLQMNNLGVEDTAVYSCARAVTNTAGAFDIWGQGTMVTVSS

SEQ ID NO: 23796 - protein, 98 aa, Homo sapiens
AASGFTFSNYWMSWVRRAPGKGLEWVAAIKQDGSAKYYVDSVKGRFTISRDNAKNSLSLQMNNLGVEDTALYSCARAVTNTAGAFDIWGQGTMVTVSS

SEQ ID NO: 23797 - protein, 98 aa, Homo sapiens
AASGFTFSSYWMTWVRQAPGKGLEWVANIKQDGSEKYYVDSVRGRFTTSRDNAKNSLFLQMNSLRAEDTAVYYCARAVTNTAGAFDIWGQGTMVTVSS

SEQ ID NO: 23798 - protein, 92 aa, Homo sapiens
VGSGFKVDEYSMHWVRQAPGKGLEWVSGVNSKGDNVGYGGSVKGRFTISRDRATNTLYLQMNSLRPEDTALYYCAKGDAMDVWGQGTTVTVS

SEQ ID NO: 23799 - protein, 91 aa, Homo sapiens
AASGFSVDDYSMHWVRKAPGEGLEWVAGINSKGDNTGYGGSVKGRFTISRDKTTNALYLQMNSLRVEDTALYYCAKGDAMDVWGEGTTVTV

SEQ ID NO: 23800 - protein, 93 aa, Homo sapiens
AASGFKVDDYAMHWVRQAPGKGLEWVSGINWKGDNVGYGASVKGRFTISRDAAKNSLYLQMYSLRGEDTALYYCAKGDAMDVWGQGTTVTVSS

SEQ ID NO: 23801 - protein, 93 aa, Homo sapiens
AAFEFSVDDYSMHWVRQPPGKGLEWVSCTNRDGTNIAYAASVKGRFTISRDNARNSFYLQMNSLRAEDTAFYYCAKGDAMDVWGQGTTVIVSS

SEQ ID NO: 23802 - protein, 93 aa, Homo sapiens
AASGFSVDDYSMHWVRQPPGKGLEWVSCTNRDGTNIAYAASVKGRFTISRDNAKNSFYLQMNSLRGEDTALYYCAKGDAMDVWGQGTTVIVSS

SEQ ID NO: 23803 - protein, 93 aa, Homo sapiens
AASGFSVDDYAMHWVRQVPGKGLEWVAGINWDSSNVGYAGSVKGRFTISRDNAKNALHLQMNNLRAQDTALYYCAKGDAMDVWGQGTTVTVSS

SEQ ID NO: 23804 - protein, 93 aa, Homo sapiens
AASGFTVENYAMHWVRQAPGKGLEWVSGINWKGDNIGYAGSVKGRFTISRDKAKNSLYLQMTSLRAEDTALYYCAKGDAMDVWGQGTTVTVSS

SEQ ID NO: 23805 - protein, 93 aa, Homo sapiens
AASGFISDLYAMHWVRQGPGKGLEWVSGINHNSNNIGYADSVKGRFTISRDKAKNSLYLQMNSLRPEDTALYYCAKGDAMDVWGQGTTVTVSS

SEQ ID NO: 23806 - protein, 93 aa, Homo sapiens
AASGFSVDDYAMHWVRQVPGKGLEWVAGINWDSSNIGYGGSVKGRFTISRDNAKNALHLQMNNLRPQDTALYYCAKGDAMDVWGQGTTVTVSS

SEQ ID NO: 23807 - protein, 93 aa, Homo sapiens
AASGFSVDDYAMHWVRQVPGKGLEWVAGVNWDRSKVDYAGSVKGRFTISRDNAKNALHLQMNNLRAQDTALYYCAKGDAMDVWGQGTTVTVSS

SEQ ID NO: 23808 - protein, 93 aa, Homo sapiens
AASGFNVGDYAMHWVRQAPGKGLEWVSGINWRGDNIGYADSVKGRFTISRDNAKNSFYLQMNSLRLEDTALYYCAKGDAMDVWGQGTTVTVSS

SEQ ID NO: 23809 - protein, 93 aa, Homo sapiens
AASGFNVGDYAMHWVRQAPGKGLEWVSGINWRGDNIGYADSVKGRFTISRDNAKNSFYLQMNSLRLEDTALYYCAKGDAMDVRGQGTTVTVSS

SEQ ID NO: 23810 - protein, 92 aa, Homo sapiens
AAFGFKADDYAMHWVRQAPGKGLEWVSGINRKSDNIGYGESVKGRFTISRDKVRNSLYLQMNSLRGDDTALYYCAKGDAMDVWGQGTTVTVS

SEQ ID NO: 23811 - protein, 91 aa, Homo sapiens
AASGFSVDQYSMHWVRKAPGEGLEWVAGINWKGDNTGYGGSVKGRFTISRDKTTNALYLQMNSLRVADTALYYCAKGDAMDVWGEGTTVTV

SEQ ID NO: 23812 - protein, 93 aa, Homo sapiens
AAFGFNADDYAMHWVRQAPGKGLEWVSGINRKSDNIGYGESVKGRFTISRDKVRNSLYLQMNSLRGDDTALYYCAKGDAMDVWGQGTTVTVSS

SEQ ID NO: 23813 - protein, 91 aa, Homo sapiens
AASGFSVDHYSMHWVRKAPGEGLEWVAGINSKGDNTGYGGSVKGRFTISRDKTTNALYLQMNSLRVADTALYYCAKGDAMDVWGEGTTVTV

SEQ ID NO: 23814 - protein, 93 aa, Homo sapiens
AAAGFKVDNFAMHWVRQAPGKGLEWVSGINWRGNNVGYGDSVKGRFTISRDKVNNTLYLQMNSLRGEDTALYYCAKGDAMDVWGQGTTVTVSS

SEQ ID NO: 23815 - protein, 93 aa, Homo sapiens
AASGFSIDDYAMHWVRQVPGKGLEWVAGVNWDRSKVDYAGSVKGRFTISRDNAKNALHLQMNNLRAQDTALYYCAKGDAMDVWGQGTTVTVSS

SEQ ID NO: 23816 - protein, 93 aa, Homo sapiens
AGSGFTVDNYAMHWVRQAPGKGLEWVSGINWSSTNIGYADSVKGRFTISRDSGKNSLYLQMSSLRADDSAVYYCAKGDAMDVWGQGTTVTVSS

SEQ ID NO: 23817 - protein, 93 aa, Homo sapiens
ATSGFTFDDYAFHWVRQAPGKGLEWVSCITWNSGNKGYAASVKGRFTISRDNAKKSVYLQMNSLRPEDTALYYCAKGDAMDVWGQGTTVTVSS

SEQ ID NO: 23818 - protein, 103 aa, Homo sapiens
TQTLTLTCTFSGFSLSTSGMCVTWIRQPPGKALEWLALIDWDDNKYYSTSLKTRLTISKDTSKNQVVLIMTNMDPVDTGTYYCARRWDGMDVWGQGTTVTVSS

SEQ ID NO: 23819 - protein, 103 aa, Homo sapiens; identical to SEQ ID NO: 23818

SEQ ID NO: 23820 - protein, 103 aa, Homo sapiens
TQTLTLTCTFSGFSLNTNGMCVSWIRQPPGKALEWLALIDWDDNKYYSTSLKTRLTISKDTSKNQVVLIMINVDPVDTATYYCARRWDGMDVWGQGTTVTVSS

SEQ ID NO: 23821 - protein, 103 aa, Homo sapiens
TQTLTLTCTFSGFSLSTSGMCVSWIRQPPGKALEWLALIDWDDNKYYSRSLKTRLTISKDTSKNQVVLIMTNMDPVDTAMYYCARRWDGMDVWGQGTTVTVSS

SEQ ID NO: 23822 - protein, 93 aa, Homo sapiens
ASGYKFTSYGMNWVRQAPGQGLEWMGWINTNTGNPTYAQGFTGRFVFSLDTSVSTAYLQISSLKAEDTAVYYCAKNRWLPDYWGQGTLVTVSS

SEQ ID NO: 23823 - protein, 93 aa, Homo sapiens
ASGYTFSNYGMNWVRQAPGQGLEWMGWINTKTGNPTYAQGFTGRFVFSLDTSVSTAYLQISSLKAEDTAVYYCAKNRWLPDYWGQGTLVTVSS

SEQ ID NO: 23824 - protein, 99 aa, Homo sapiens
AASGFTFSSYAMSWVRQAPGKGLKWVSGISGSGSSTYYADSVKGRFTISRDNSKNTLYLQMNSLRAEDSAVYYCAKGRNYYDSSGYYSWGQGTLVTVSS

SEQ ID NO: 23825 - protein, 99 aa, Homo sapiens
AASGFTLSSYAMSWVRQAPGKGLEWVSGISGTGSSTYYADSVKGRFTISRDNSKNTLSLQMNSLRAEDTAVYYCAKGRNYYDSSGYYSWGQGTLVTVSS

SEQ ID NO: 23826 - protein, 99 aa, Homo sapiens
AASGFTFSSYAMSWVRQAPGKGLEWVSGISGSGSSTYYADSVKGRFTISRDNSQNTLYLQMNSLRAEDTAVYYCAKGRNYYDSSGYYSWGQGTLVTVSS

SEQ ID NO: 23827 - protein, 99 aa, Homo sapiens; identical to SEQ ID NO: 23826

SEQ ID NO: 23828 - protein, 99 aa, Homo sapiens
AASGFTLSTYAMSWVRQAPGKGLEWVSAISGTGSSTYYADSVKGRFTISRDNSKNTLSLQMNSLRAEDTAVYYCAKGRNYYDSSGYYSWGQGTLVTVSS

SEQ ID NO: 23829 - protein, 99 aa, Homo sapiens
AASGFTLSSYAMSWVRQAPGKGLEWVSAISGTGSSTYYADSVKGRFTISRDNSKNTLSLQMNSLRAEDTAVYYCAKGRNYYDSSGYYSWGQGTLVTVSS

SEQ ID NO: 23830 - protein, 99 aa, Homo sapiens
VASGFTFSSYAMSWVRQAPGKGLEWVSGISGSGSSTYYADSVKGRFTISRDNSQNTLYLQMNSLRAEDTAVYYCAKGRNYYDSSGYYSWGQGTLVTVSS

SEQ ID NO: 23831 - protein, 96 aa, Homo sapiens
VASGFTFSSYAMTWVRQAPGKGLEWVSAISHSGDNTYYADSVKGRFTISRDNSKNTLYLQMNSLRADDTAVYYCAKDSRAYYFDYWGQGTLVTVSS

SEQ ID NO: 23832 - protein, 96 aa, Homo sapiens
VASGFTFSSYAMNWVRQAPGKGLEWVSIIYSGGGSTYYADSVKGRFTISRDNSKNTLYLQMNSLRAEDTAVYYCAKDSRAYYFDYWGQGTLVTVSS

SEQ ID NO: 23833 - protein, 91 aa, Homo sapiens
AASGIAVSDNFMSWVRQAPGKGLEWVSLITGGGTTVYADSVKGRFTISTDKSKNTLYLLMNSLRAEDTAVYYCTTGAMDVWGQGTTVTVSS

SEQ ID NO: 23834 - protein, 91 aa, Homo sapiens
AASGFTVSSTFVNWVRQAPGKGLEWVSLIATGGTTYYVDSVKGRFTVSRDISKNTLYLHMNSLRAEDTAVYYCTTGAMDVWGQGTTVTVSS

SEQ ID NO: 23835 - protein, 91 aa, Homo sapiens
AASGFGVSDNFMSWVRQAPGKGLEWVSLITGSGGTVYIDSVKGRFTVSTDKSKNTLYLLMNSLRVEDTAVYYCTTGAMDVWGQGTTVTVSS

SEQ ID NO: 23836 - protein, 91 aa, Homo sapiens
AASGFAVSDNFMSWVRQAPGKGLEWVSLITGGGTTVYADSVKGRFTISADKSKNTLYLLMNSLRAEDTAVYYCTTGAMDVWGQGTTVTVSS

SEQ ID NO: 23837 - protein, 92 aa, Homo sapiens
AASGFGVSDTFNFMSWVRQAPGKGLEWVSLITGRGTTVYADSVKGRFTISTDKSKNTLYLLMNSLRAEDTAVYYCTTGAMDVWGQGTTVTVS

SEQ ID NO: 23838 - protein, 95 aa, Homo sapiens
AASGFSFSRYTMHWVRQAPGKGLMWVSRITSDERTISHADSLNGRFTISRDNAKNTLYLQMNSLRAEDTAVYFCARSVEHGLDVWGQGTPVTVSS

SEQ ID NO: 23839 - protein, 95 aa, Homo sapiens
ATSGFRFSVYTMHWVRQAPGKGLMWVSRMTSDERTTSHADSVNGRFTISRDNAKNTLYLQMNSLRAEDTAVYYCARSVEHGLDVWGQGTTVTVSS

SEQ ID NO: 23840 - protein, 94 aa, Homo sapiens
TSGFNFSPYTFHWVRQGPGKGLVWVSRLNGNGNIRSYADAVKGRFTISRDNAKSTLFLQMNSLRVEDTGVYYCARSVEHGLDVWGQGTMVTVSS

SEQ ID NO: 23841 - protein, 94 aa, Homo sapiens
TSGFNFSPYTFHWVRQDPGKGLVWVSRLNGNGNIRSYADAVKGRFTISRDNAKSTLFLQMNSLRVEDTGVYYCARSVEHGLDVWGQGTMVTVSS

SEQ ID NO: 23842 - protein, 94 aa, Homo sapiens
ASEFSFSPYTMHWVRQPPGKGLMWVSRIIGNGRTISHADSVNGRFTISRDNAKNTLYLQMNSLRAEDTAVYYCARSVEHGLDVWGQGTTVTVSS

SEQ ID NO: 23843 - protein, 93 aa, Homo sapiens
SGFNFNIYTMHWARQVTGKGLIWVSRINGDGRTTSYADSVKGRFTISRDNAKSTLYLQMSSLKVEDTGIFYCARSVEHGLDVWGQGTTVTVSS

SEQ ID NO: 23844 - protein, 94 aa, Homo sapiens; identical to SEQ ID NO: 23840

SEQ ID NO: 23845 - protein, 95 aa, Homo sapiens
VASGFTLSSYYIHWVRQAPGKGLVCVSRINIDGSVTKYADSVKGRFTISRDNAKNTLYLEMNSLTAEDTAVYYCARGYRYGMDVWGQGTTVTVSS

SEQ ID NO: 23846 - protein, 95 aa, Homo sapiens; identical to SEQ ID NO: 23845

SEQ ID NO: 23847 - protein, 95 aa, Homo sapiens
EASGFTFSGFAMHWVRQAPGKGLAWVSFIRNDGSGTSYAGSVKGRFTISRDNAKGTLYLQMNSLRAEDTAVYYCARGYRYGMDVWGQGTTVTVSS

SEQ ID NO: 23848 - protein, 99 aa, Homo sapiens
ASGFTFSNAWMSWVRQAPGKGLEWVGRIKRKIDGGTTEYAAPVKDRFTISRDDSKNTLYLEMNSLKIDDTAVYYCTPDRVVPGAYFDYWGQGTLVTVSS

SEQ ID NO: 23849 - protein, 100 aa, Homo sapiens
GTSGFSFSDAWMSWVRQAPGKGLEWLGRIKSKTDGGATDYAAPVKGRFTISRDDSTNTLFLQMNSLKTEDTAVYYCTPDRVVPGAYFDYWGQGTLVTVSS

SEQ ID NO: 23850 - protein, 95 aa, Homo sapiens
ATSGFTFSNNWMSWVRQAPGKGLEWVANIKPDGSVKNYVGSVKGRFTISRDNAENSLYLQMNSLRAEDTAVYYCAKDSYSRGDYWGQGTLVTVSS

SEQ ID NO: 23851 - protein, 95 aa, Homo sapiens
AASGFTFSNDWMSWVRQAPGKGLEWVANINPDGSAKNYVGSVKGRFTISRDNAKNSLYLQMNSLRAEDTAVYYCAKDSYSRGDYWGQGTLVTVSS

SEQ ID NO: 23852 - protein, 95 aa, Homo sapiens
AASGFTFSSSWMSWVRQAPGKGLEWVTNIKADGSEQNYVDSVKGRFTISRDNAKNSLYLQMNSLRAEDTAVYYCAKDSYSRGDYWGQGTLVTVSS

SEQ ID NO: 23853 - protein, 94 aa, Homo sapiens
EASGFSFSGYWMSWVRQAPGKGLEWVANINYAEGDKYYVDSVKGRFTISRDNAQNSVYLQLNSLKAEDTAVYYCARDKWIYDYWGQGILVTVSS

SEQ ID NO: 23854 - protein, 94 aa, Homo sapiens
AASGFSFSGYWMSWVRQAPGKGLEWVANINQGEGEKNYVDSVKGRFTISRDNARNSLFLQMNSLKIEDTGVYYCARDKWIYDYWGQGTLVTVSS

SEQ ID NO: 23855 - protein, 92 aa, Homo sapiens
AASEFSVSDFWMTWVRQAPGKGLEWVATMNEDGSKKYYVDSVKGRFTISRDNAKNSLYLQLNSLRAEDTAVYFCARGHGSIWGQGTLVTVSS

SEQ ID NO: 23856 - protein, 92 aa, Homo sapiens
AASEFSVNDFWMTWVRQAPGKGLEWVATMNEDGSKKYYVDSVKGRFTISRDNAKNSLYLQLNSLRAEDTAVYFCARGHGSIWGQGSLVTVSS

SEQ ID NO: 23857 - protein, 92 aa, Homo sapiens
VDSGLSFSSYWMGWVRQAPGKGLEWVATIRQDGSDKYYVDSVRGRFTISKDNAKNSLYLQMNSLRGDDTAVYSCARGHGSIWGQGTLVTVSS

SEQ ID NO: 23858 - protein, 91 aa, Homo sapiens
AASGFTFDDYAMHWVRQAPGKGLEWVSGISWNSGAIGYADSVKGRFTISRDNAENSLFLQMNSLTDKDTALYYCTKDFWLWGQGTLVTVSS

SEQ ID NO: 23859 - protein, 91 aa, Homo sapiens
GASGFSFDDIAMHWVRQVPGKGLEWVSGISYNSVYIGYAASVKGRFTISRDNAKNSLYLEMNSLRGDDTALYYCTKDFWLWGQGVQVTVSS

SEQ ID NO: 23860 - protein, 91 aa, Homo sapiens
GASGFSFDDIAMHWVQQVPGKGLEWVSGISYNSVYIGYAASVKGRFTISRDNAKNSLYLEMNSLRGDDTALYYCTKDFWLWGQGVQVTVSS

SEQ ID NO: 23861 - protein, 92 aa, Homo sapiens
TVSGNSISDYYWNWIRQSPGKGLEWIGYLSTSGSTTYNPSLKSRVTISVDTSKNQLSLKLTSVTAADTAVYYCARRGFLDYWGQGTLVTVSS

SEQ ID NO: 23862 - protein, 92 aa, Homo sapiens
TVSGDSITNYYWNWIRQPPGKGLEWIGYLSTSGSTTYNPSLKSRVTISVDTSKNQLSLKLTSLTAADTAVYYCARRGFLDYWGQGTLVTVSS

SEQ ID NO: 23863 - protein, 92 aa, Homo sapiens
TVSGDSITNYYWNWIRQPPGKGLEWIAYLSTSGRTAYNPSLESRVTISVDTSKNQISLKLTSLTAADTAVYYCARRGFLDYWGQGTLVTVSS

SEQ ID NO: 23864 - protein, 92 aa, Homo sapiens
TVSGDSITNRYWNWIRQPPGKGLEWIGYLSTSGSTTYNPSLKSRVTISVDTSKNQLSLNLTSLTAADTAVYYCARRGFLDYWGQGALVTVSS

SEQ ID NO: 23865 - protein, 92 aa, Homo sapiens
TVSGDSITNYYWNWIRQPPGKGLEWIGYISTSGSTAYNPSLKSRVTISVDTSKNQVSLKLTSVTAADTAVYYCARRGFLDYWGQGTLVTVSS

SEQ ID NO: 23866 - protein, 92 aa, Homo sapiens
TVSGGSISSYYWSWIRQPAGKGLEWIGRIYTSGSTNYNPSLKSRVTMSVDTSKNQFSLKLSSVTAADTAVYYCARRGFLDYWGPGILVTVSS

SEQ ID NO: 23867 - protein, 91 aa, Homo sapiens
TVSGVSVNDYYWSWIRQPPGKGLEWIGYISNNGTNYNPSLTSRLTISVDLSKNQFSLKLDSVTAADTAVYYCARRGFLDYWGPGILVTVSS

SEQ ID NO: 23868 - protein, 92 aa, Homo sapiens
TVSGDSITNYYWNWIRQPPGKGLEWIGYLSTSGSTTYNPSLKSRVTISVDTSKNQFSLKLTSLTAADTAVYYCARRGFLDYWGQGTLVTVSS

SEQ ID NO: 23869 - protein, 92 aa, Homo sapiens
TVFGDSITNYYWNWIRQPPEKGLEWIGYLATSGSTTYNPSLKSRVSISVDTSKNQVSLKLTSLTAADTAVYYCARRGFLDYWGQGTLVTVSS

SEQ ID NO: 23870 - protein, 92 aa, Homo sapiens
TVSGDSITNYYWNWIRQPPGKGLEWIGYRSTSGSTTYNPSLKSRVTISVDTSKNQISLKLTSLTAADTAVYYCARRGFLDYWGQGTLVTVSS

SEQ ID NO: 23871 - protein, 92 aa, Homo sapiens
TVSGDSITNYYWNWIRQPPGKGLEWIGYLSTSGSTTYNPSLKSRVTISVDTSKNQVSLKLTSLTAADTAVYYCARRGFLDYWGQGTLVTVSS

SEQ ID NO: 23872 - protein, 92 aa, Homo sapiens
TVSGDSITNHYWNWMRQPPGKGLEWIGYLSTSGTTTYNASLKSRVAISVDTSKNQVSLTLTSVTAADTAVYYCARRGFLDYWGQGTLVTVSS

SEQ ID NO: 23873 - protein, 99 aa, Homo sapiens
AASGFTLSSYAMSWVRQAPGEGLEWVSAISGSGGNTDYADSVKGRFTISRDNSKNTLYLQMNSLRAEDTAVYYCAKDFVGVVADAFDIWGQGTMVTVSS

SEQ ID NO: 23874 - protein, 99 aa, Homo sapiens
AASGFTFSNYAMTWVRQTPGKGLEWVSGVSGSGGGTYYADSVMGRFTISRDNSKNTLYLQMNSLRAEDTAVYYCAKDFVGVVADAFDIWGQGTMVTVSS

SEQ ID NO: 23875 - protein, 99 aa, Homo sapiens; identical to SEQ ID NO: 23874

SEQ ID NO: 23876 - protein, 98 aa, Homo sapiens
ASGFTFSNYAMTWVRQTPGKGLEWVSGVSGSGGGTYYADSVMGRFTISRDNSKNTLYLQMNSLRAEDTAVYYCAKDFVGVVADAFDIWGQGTMVTVSS

SEQ ID NO: 23877 - protein, 99 aa, Homo sapiens
AASGFTFSNYAMTWVRQTPGKGLEWVSGVSGSGGGTYYADSVMGRFTISRDNSKNTLYLQMNSLKAEDTAVYYCAKDFVGVVADAFDIWGQGTMVTVSS

SEQ ID NO: 23878 - protein, 99 aa, Homo sapiens
AASGFTFSNYAMTWVRQTPGKGLEWVSGVSGSGGGTYYADSVMGRFTISRDNSKNTLYLQMNSLRAEDTAVYYCAKDFVGVVADAFDIWGQGTMVTASS

SEQ ID NO: 23879 - protein, 100 aa, Homo sapiens
TASGFTFGDYAMSWFRQAPGKGLEWVGFIRSKTYGGTTEYAASVKGRFTISRDDSKSVAYLQMNSLKTEDTAVYYCTRVPYSSGWYGDYWGQGTLVTVSS

SEQ ID NO: 23880 - protein, 100 aa, Homo sapiens
TASGFTFGDYGMSWVRQAPGKGLDWVGFISSKAYGETTKYAASVKGRFTISRDDSKSIAYLQMNSLKTDDTAVYYCTRVPYSSGWYGDYWGQGTLVTVSS

SEQ ID NO: 23881 - protein, 100 aa, Homo sapiens
TASGFTFGDYGMSWVRQAPGKGLDWVGFISSKAYGETTKYAASVKGRFTISRDDSKSIAYLQMNSLKTDDTAVYYCTRVPYSSGWYGDYGGQGTLVTVSS

SEQ ID NO: 23882 - protein, 93 aa, Homo sapiens
AASGFTFSSYWMNWVRQAPGKGLEWVANIKQDGSEKNYVDSVKGRFTISRDNAKNSLYLQMNSLRAEDTAVYFCARGSAAAFWGQGTLVTVSS

SEQ ID NO: 23883 - protein, 93 aa, Homo sapiens
AASGFTFSSYWMNWVRQAPGKGLEWVANIKQDGGEKYYVDSVKGRFTISRDNAKNSLYLQMNSLRAEDTAVYYCARGSAAAFWGQGTLVTVSS

SEQ ID NO: 23884 - protein, 102 aa, Homo sapiens
EASGFAFSTYAMIWVRQAPGKGLECVTIIWYDGSQEYYVDSVRGRFTVSRDNSKNTVYLQMNGLRGEDTAVYYCARDPPDSSGYYHNAFDLWGQGTMVTVSS

SEQ ID NO: 23885 - protein, 102 aa, Homo sapiens
AASGFPFSTYAMIWVRQPPGEGLECVAIIWYDGSQEYYADSVKGRFTISRDNSRNTLFLQMDSLRADDTAFYYCARDPPDSSGYYHNAFDLWGQGTMVIVSS

SEQ ID NO: 23886 - protein, 102 aa, Homo sapiens
AASGFPFSTYAMIWVRQAPGEGLECVAIIWYDGSQEYYADSVKGRFTISRDNSRNTLFLQMDSLRADDTAFYYCARDPPDSSGYYHNAFDLWGQGTMVIVSS

SEQ ID NO: 23887 - protein, 102 aa, Homo sapiens; identical to SEQ ID NO: 23885

SEQ ID NO: 23888 - protein, 102 aa, Homo sapiens
AASGFPFSTYAMIWVRQAPGEGLECVAIIWYDGSQEYYADSVKGRFTISRDNSRNTLFLQMDSLRADDTAVYYCARDPPDSSGYYHNAFDLWGQGTKVIVSS

SEQ ID NO: 23889 - protein, 102 aa, Homo sapiens; identical to SEQ ID NO: 23884

SEQ ID NO: 23890 - protein, 100 aa, Homo sapiens
TVSGASINSGPYYWGWIRQPPGKGLEWIGSIDYSGTTYYNPSLKSRVIVSADTSKNQFSLNLISVTAADTAVYYCARRGPYGSGGWFDPWGQGTLVTVSS

SEQ ID NO: 23891 - protein, 100 aa, Homo sapiens
TVSGDSISSRNYYWGWIRQPPGKGLEWIGTIYYSGTTYYNPSLKSRVTVSTDTSKNQFSLNLRSVTAADTAVYYCARRGPYGSGGWFDPWGQGTLVTVSS

SEQ ID NO: 23892 - protein, 101 aa, Homo sapiens
IVSGGSISSGSYYWGWVRQPPGKGLEWIGSFYYSGNNYYYNPSLKSRVTISVDSPKNQFSLKLSSVTAADTAVYYCARRGPYGSGGWFDPWGQGTLVTVSS

SEQ ID NO: 23893 - protein, 94 aa, Homo sapiens
KGSGYSFSTHWIGWVRQMPGKGLEWMGIIYPGDSDTRYSPSFQGQVTISADKSISTAYLQWSSLKASDSAMYYCARRSGGVDVWGQGTTVTVSS

SEQ ID NO: 23894 - protein, 94 aa, Homo sapiens; identical to SEQ ID NO: 23893

SEQ ID NO: 23895 - protein, 94 aa, Homo sapiens
KGSGYNFPNYWIGWVRQMPGKGLEWMGIIYPGNSDTRYSPSFQGQVTISADKSISTAYLQWSSLKASDTAMYYCARRSGGVDVWGKGTTVTVSS

SEQ ID NO: 23896 - protein, 95 aa, Homo sapiens
AASGFSFSFYSMSWVRQAPGKGLEWISYIRSSSSTIYYADSVKGRFTISSDNAENSLFLQMNSLRDDDTAVYYCARDEGYAFDIWGQGTMVTVSS

SEQ ID NO: 23897 - protein, 95 aa, Homo sapiens
AASGFSFSSYSMNWVRQAPGKGLEWLSYIRHSSGTMGYADSVKGRFTVSRDNAKTSLFLQMNSLRDEDTAVYYCARDEGYAFDIWGQGTEVTVSS

SEQ ID NO: 23898 - protein, 95 aa, Homo sapiens; identical to SEQ ID NO: 23896

SEQ ID NO: 23899 - protein, 94 aa, Homo sapiens
ASGFSFSFYSMSWVRQAPGKGLEWISYIRSSSSTIYYADSVKGRFTISSDNAENSLFLQMNSLRDDDTAVYYCARDEGYAFDIWGQGTMVTVSS

SEQ ID NO: 23900 - protein, 95 aa, Homo sapiens
AASGFSFSFYSMSWVRQAPGKGLEWISYIRSSNSTIYYADSVKGRFTISSDNAENSLFLQMNSLRDDDTAVYYCARDEGYAFDIWGQGTMVTVSS

SEQ ID NO: 23901 - protein, 95 aa, Homo sapiens
AASGFSFSFYSMSWVRQAPGKGLEWISYIRSSSSTIYYADSVKGRFTISSDNAENSLSLQMNSLRDDDTAVYYCARDEGYAFDIWGQGTMVTVSS

SEQ ID NO: 23902 - protein, 96 aa, Homo sapiens
AASGFTFNSFWMHWVRQAPGKGLVWVSRINSDGSSTSYADSVKGRFSISRDNVKNTLYLQMNSLRAEDTGVYYCARRGDYGDFDYWGQGTLVTVSS

SEQ ID NO: 23903 - protein, 96 aa, Homo sapiens
VASGFPFSDYWMHWVRQGPGKGLVWVSRIKSDGSSTSYADSVKGRFTISRDNAKNTLYLQMNSLRAEDTAVYYCARRGDYGDFDYWGQGTLVTVSS

SEQ ID NO: 23904 - protein, 96 aa, Homo sapiens
AVSGLTFDLYAMHWVRQAPGKGLEWVSSISLDSDRVDYADSVKGRFTISRDTAKKSVYLQMNSLRAEDTALYYCGKDLVPGGLDVWGQGTAITVSS

SEQ ID NO: 23905 - protein, 94 aa, Homo sapiens
SGFTSEKYAMHWVRQAPGKALEWVSGFSLDTSRIDYADSVKGRFTTSRDNGKNTLYLQMNSLRPEDTAVYYCGKDLVPGGLDVWGPGTTVTVSS

SEQ ID NO: 23906 - protein, 93 aa, Homo sapiens
VSGVPFRDYAMHWIRQVPGKGLEWVSGIFLESDRISYADSVRGRFSVSRDNTKNSLYLQMNSLRTEDTGVYYCGKDLVPGGLDVWGPGTTVTV

SEQ ID NO: 23907 - protein, 97 aa, Homo sapiens
ISGDSVSSNSAAWNWIRQSPSRGLEWLGRTYYRSKWYNDYAVSVKSRITINPDTSKSQFFLQVNSVTPEDTAVYYCARERQRLFDYWGQGTLVTVSS

SEQ ID NO: 23908 - protein, 97 aa, Homo sapiens
ISGDSVSSNSAAWIWIRQSPSRGLEWLGRTYYRSKWSNDYAVSVKSRITINPDTSKNQFSLQLNSVTPEDTAVYYCARERQRLFDYWGQGTLVTVSS

SEQ ID NO: 23909 - protein, 95 aa, Homo sapiens
AASGFTFSSYWMHWVRQAPGKGLVWVSRINSDGSSTSYADSVKGRFTISRDNAKNTLSLQMNSLRAEDTAVYYCVRQDSGSPGYWGQGTLVTVSS

SEQ ID NO: 23910 - protein, 95 aa, Homo sapiens
AASGFTFSSYWMHWVRQAPGKGLVWVSRINSDGSSTSYVDPVKGRFTISRDNAKNTLSLQMNSLRAEDTAVYYCVRQDSGSPGYWGQGTLVTVSS

SEQ ID NO: 23911 - protein, 95 aa, Homo sapiens
AASGFTFSSYWMHWVRQAPGKGLVWVSRINSDGSSTSYADSVKGRFTISRDNAENTLSLQMNSLRVEDTAVYYCVRQDSGSPGYWGQGTLVTVSS

SEQ ID NO: 23912 - protein, 96 aa, Homo sapiens
AASGFTFSSYGMDWVRQTPGRGLEWVAVIWYDGGTKYYADSVKGRFTISKDNSRNTLYLQMNSLRAEDTAVYYCARLTSTWAFDIWGQGTMVTVSS

SEQ ID NO: 23913 - protein, 96 aa, Homo sapiens; identical to SEQ ID NO: 23912

SEQ ID NO: 23914 - protein, 96 aa, Homo sapiens
EASGFTFSSYGMDWVRQAPGKGLEWVAIIWYDGSKKYYADSVKGRFTISKDNSKNTLYLQMNSLRVEDTAVYYCARLTSTWAFDIWGHGTLVTVSS

SEQ ID NO: 23915 - protein, 95 aa, Homo sapiens
AASGFTFSSYWMYWVRQGPGKGLVWVSGIKRDGTITSYADSVKGRFTISRDNAKNTLYLQMNSLRGEDTAVYYCARGLNYGMDVWGQGTTVTVSS

SEQ ID NO: 23916 - protein, 95 aa, Homo sapiens
AASGFTFSSNNIHWVRQAPGKGLVWVSRINSDGSRTIYADSVKGRFTISRDNAKNTLYLQMNSLRAEDAAVYYCARGLNYGMDVWGQGTTVTVSS

SEQ ID NO: 23917 - protein, 90 aa, Homo sapiens
AASGFTFRKTSMAWLRQAPGRGPEWVSDITGNGRKTDYADSVRGRFTISRDNSRNTLFLQMTSLRSEDTAVYYCAGLWSWGPGTLVTVAS

SEQ ID NO: 23918 - protein, 90 aa, Homo sapiens
AASGFTFSTSDMNWVRQAPGKGLEWVSRISGAGDRTYYADSVKGRFTISRDNSKNTVSLQMDSVRADDTAVYYCAGLWSWGQGTLVTVSS

SEQ ID NO: 23919 - protein, 96 aa, Homo sapiens
AVSGFTLSEPFMDWVRQAPGKGLEWIGLIQNKAWSHTTYYAASVKGRFTISRDDSQNLVFLQMNSLKTEDTAVYYCAKDWNGSPEYWGQGVLVTVS

SEQ ID NO: 23920 - protein, 97 aa, Homo sapiens
AASGFIFSDTYMDWVRQAPGKGLEWIGLIRDKAHGYKTEYAASVKGRFTISRDDSKTSLYLQLNRLESEDTAVYYCAKDWNGSPEYWGRGSLVTVSS

SEQ ID NO: 23921 - protein, 96 aa, Homo sapiens
AVSGFTLSEPFMDWVRQAPGKGLEWIGLIQNKAWSHTTYYAPSVKGRFTISRDDSQNLVFLQMNSLKAEDTAVYYCAKDWNGSPEYWGQGVLVTVS

SEQ ID NO: 23922 - protein, 98 aa, Homo sapiens
VASGFTFSGHAMHWVRQAPGKGLEWLAQIWFDGSKKYYADSVKGRFTISRDNSKNTVSLQMNSVRDEDTAMYYCARDGQQLAAYAMDVWGQGTTVTVS

SEQ ID NO: 23923 - protein, 98 aa, Homo sapiens
VASGFTFSGHAMHWVRQAPGKGLEWLAQIWSDGSRKYYADSVRGRFTISRDTSKNTVYLQMNSVKDEDTAMYYCARDGQQLAAYAMDVWGQGTTVTVS

SEQ ID NO: 23924 - protein, 98 aa, Homo sapiens
VASGFTFSNHAMHWVRQAPGKGLEWLAQIWYDGSKKYYADSVKGRFTISRDNSKNTVHLQMNSVRDEDTAMYYCARDGQQLAAYAMDVWGQGTTVTVS

SEQ ID NO: 23925 - protein, 97 aa, Homo sapiens
ASGFTFKDHAMHWVRQAPGKGLEWLTQVWYDGSNKNYADSVKGRFTVSRDNSKNTLYLQMNSLRAEDTAVYYCARDGQQLAAYAMDVWGQGTTVTVS

SEQ ID NO: 23926 - protein, 99 aa, Homo sapiens
EASGFTFSRHAIHWVRQAPGKGLEWVAQIWSDGSNKYYADSVKGRFTISRDNSKNTVFLQMNTLRAEDTAVYYCARDGQQLAAYAMDVWGQGTTVAVSS

SEQ ID NO: 23927 - protein, 94 aa, Homo sapiens
SGYTFSNYAIHWVRQAPGQGLECMGWINGGDAYTKYSQKFQGRVTITRDTSANTVYMELSSLRSEDTAVYYCARDWLTSGFDYWGQGTLVTVSS

SEQ ID NO: 23928 - protein, 95 aa, Homo sapiens
ASGYTFSNYAIHWVRQAPGQGLECMGWINGGDGRTTYSRKFQGRLTITQDTTATTAYMELSGLTSEDTAKYFCARDWLTSGFDYWGQGALVTVSS

SEQ ID NO: 23929 - protein, 94 aa, Homo sapiens
SGYTFSNYAIHWVRQAPGQGLECMGWINGGDAYTKYSQKFQGRVTITRDTSANTVYMELSSLRSEDTTVYYCARDWLTSGFDYWGQGTLVTVSS

SEQ ID NO: 23930 - protein, 96 aa, Homo sapiens
AASGFTFNSYNMNWVRQAPGKGLEWVSSISGSSDNIYYADSLKGRFTISRDNAKSSLYLQINSLRAEDTAVYYCAKGWFGTVGDYWGQGTLVTVSS

SEQ ID NO: 23931 - protein, 96 aa, Homo sapiens
AASGFTFSNYNLNWVRQAPGKGLEWVSSISGSSTYIYYAESVKGRFTISRDNAKNSLYLQMNSLRAEDTAVYYCAKGWFGTVGDYWGQGTLVTVSS

SEQ ID NO: 23932 - protein, 97 aa, Homo sapiens
ISGESVSSNNAAWNWIRQSPWRGLEWLGRTYYRSTWVHEYAVSVRSRITINPDTSKNLLSLQLKSVTPEDTAVYYCTRGHHLAFAYWGQGTLVTVSS

SEQ ID NO: 23933 - protein, 98 aa, Homo sapiens
ISGESVSSDNAAWNWIRQSPSRGLEWLGRTYYRRSKWFHEYAVSVRSRITINPDTSKNHLSLQLNSVTPEDTAIYYCTRGHHLAFAYWGQGTLVTVSS

SEQ ID NO: 23934 - protein, 97 aa, Homo sapiens
ISAESVSSENAAWNWIRQSPSRGLEWLGRIYYRSKWHIEYAPSVKSRITIDPDTSKNQFSLQLTSVTPEDTAVYYCTRGHHLAFAYWAQGTLVTVSS

SEQ ID NO: 23935 - protein, 92 aa, Homo sapiens
AASGFTFSRSWMSWVRQAPGKGLEWVANIKQDGSEKYYVDSVKGRFTISRDNAKNSLFLQMNSLRAEDTAIYYCARDVGTGWGQGTLVTVSS

SEQ ID NO: 23936 - protein, 92 aa, Homo sapiens
VVSGFTFSSEWMAWVRQAPGKGLEWVANLNQDGSNKYYVDSVKGRFTISRDNAKNSLYLQMNSLRAEDTAVYFCARDVGTGWGQGTLVTVSS

SEQ ID NO: 23937 - protein, 95 aa, Homo sapiens
AVYGGSLSGHYRGWIRQPPGKGLEWIGEVHHSGSTNYNPSLKSRVTISLDTSNNQFSLKLNSVTAADTAVYYCATSSGWYRLDYWGQGTLVTVSS

SEQ ID NO: 23938 - protein, 95 aa, Homo sapiens; identical to SEQ ID NO: 23937

SEQ ID NO: 23939 - protein, 95 aa, Homo sapiens
AVHSGSLSDYYWGWIRQPPGKGLEWIGDISHSGAPNYNPSLKSRVTMSRDTSKSQFSLKLTSVTAADTAVYYCATSSGWYRLDYWGQGTLVTVSS

SEQ ID NO: 23940 - protein, 96 aa, Homo sapiens
VSGFIFSSYGMTWVRQAPGKGLEWVSHINARASVKSYADSVKGRFTISRDDAKSTLHLQIDSLRAEDTAVYYCARDEEGDRDFDYWGQGTLVTVSS

SEQ ID NO: 23941 - protein, 97 aa, Homo sapiens
AVSGFIFSAFGMNWVRQAPGKGLEWVSHINSRGSYIYYADSVKGRFTISRDNAKNLLYLQMNSLRDDDTAVYYCARDEEGDRDFDYWGQGTLVTVSS

SEQ ID NO: 23942 - protein, 97 aa, Homo sapiens
TVSGGSISPYYWTWIRQPPGRGLEYIGYIYYTGSANYNPSLNSRVTISVDTSRNQFSLRLSSVTAADTAVYYCARLHYYASEEFDSWGQGTLVTVSS

SEQ ID NO: 23943 - protein, 96 aa, Homo sapiens
VSGASISGHYWSWIRQSPGQGLEYIGYIHSTGSTHYTPSLRSRLTLSVDTSRNQFSLRLTSVTTADTAVYFCARLHYYASEEFDSWGQGTLVTVSS

SEQ ID NO: 23944 - protein, 96 aa, Homo sapiens
AASGFIFSNYAMSWVRQAPGKGLEWVSGISGSGGSTYYVDSVKGRFTISRDNSKNTLYLQVNSLRAEDTAIYYCAKEGTATTYYYWGQGTLVIVSS

SEQ ID NO: 23945 - protein, 96 aa, Homo sapiens
ATSGFTFSNYAMNWVRQAPGKGLEWVSGISSSGGSTYYADSVKGRFTISRDNSKSTLYLQMNTLRPEDTAVYYCAKEGTATTYYYWGQGTLVTVSS

SEQ ID NO: 23946 - protein, 92 aa, Homo sapiens
AASGFTFNNYWMNWVRQAPGKGLEWVANIKQDGSEKYYVDSVKGRFTISRDNAKKSLYLQMNSLRAEDTAMYYCVRGSGGIWGQGTMVTVSS

SEQ ID NO: 23947 - protein, 92 aa, Homo sapiens
AASGFTFSNYWMNWVRQAPGKGLECVANIKQDGSEKNYVDSVKGRFTISRDNAKNSLYLQMNSLTAEDSAVYYCVRGSGGIWGQGTMVTVSS

SEQ ID NO: 23948 - protein, 93 aa, Homo sapiens
TVSGDSIINSGIYYWGWIRQPPGKGPEWIGSIYYGGSTYYNPSLKSRVTISVDTSKNQFSLKLRSVTAADSALYYCARGLDHWGQGSLVTVSS

SEQ ID NO: 23949 - protein, 92 aa, Homo sapiens
TVSGGSISSSVYSWGWIRQPPGKGLEWIGSMYHSGSTYYNASLKSRVTISVDTSKNQFSLMLSSVTAADTAVYYCARGLDHWGQGTLVTVSS

SEQ ID NO: 23950 - protein, 94 aa, Homo sapiens
ASGYPLTRYYMHWVRQAPGQGLEWMGIIDPSADTTIYAQRFQGRVTMARDTSTSTVYMELSSLKSEDTAVYYCAAGMVRGVDYWGQGTLVTVSS

SEQ ID NO: 23951 - protein, 94 aa, Homo sapiens
ASGYPLTRYYMHWVRQAPGQGLEWMGIIDPSADSTVYAQKFQGRVTMTRDTSTSTVYMELSSLKSEDTAVYYCAAGMVRGVDYWGQGTLVTVSS

SEQ ID NO: 23952 - protein, 94 aa, Homo sapiens
ASGNTFTKYYLHWVRQAPGQGLEWMAIINPNDGGTIYAQKFQGRLTLTRDTSTSTVYMELSKLRSDDTAVYYCAAGMVRGVDYWGQGTLVTVSS

SEQ ID NO: 23953 - protein, 94 aa, Homo sapiens
ASGYTFTKYYLHWVRQAPGQGLEWMGIINPSDGGTTYAQNFQGRVILTRDTSTSTVYMDLINLTSEDTAIYYCAAGMVRGVDYWGQGTLVTVSS

SEQ ID NO: 23954 - protein, 94 aa, Homo sapiens
ASGYTFTRYYLHWVRQAPGQGLEWMGIINPSDGGTTYAQNFQGRITLTRDTSTSTVYMELNSLRSEDTAIYYCAAGMVRGVDYWGQGTLVTVSS

SEQ ID NO: 23955 - protein, 94 aa, Homo sapiens
ASGYPLTRYYMHWVRQAPGLGLEWMGIIDPGADTTIYAQRFQGRVTMTRDTSTSTVYMELSSLKSEDTAVYYCAAGMVRGVDYWGQGTLVTVSS

SEQ ID NO: 23956 - protein, 97 aa, Homo sapiens
AASGFTFRSSAMSWVRQAPGKGLEWVSSITESGGGTNYADSVKGRFIISRDNSKNTLFLQMNTLRAEDTAIYYCANRRSDYRQFHFWGQGTLVTVSS

SEQ ID NO: 23957 - protein, 97 aa, Homo sapiens
VASGFTFSSYAMSWVRQAPGKGLEWVSSISEGGSSTSYADSVKGRFIISRDNSKNTLSLQMNTLRAEDTALYYCANRRSDYRQFHFWGRGTLVTVSS

SEQ ID NO: 23958 - protein, 100 aa, Homo sapiens
EASGFTFNYAWMSWVRQGPGKGLEWVGRIRSKVDGGAIEYAAPVRGRFTISRDDSKDTLYLQMNSLTTEDTGVYFCATDGWELLGYFDYWGQGSLVTVSS

SEQ ID NO: 23959 - protein, 100 aa, Homo sapiens
AASGFTFINAWMNWVRQAPGKGLEWVARIKSNIDGGTTDYAASVKGRFTISRDDSKNTLYLQMSGLEIEDTAVYYCATDGWELLGYFDYWGRGTLVTVSS

SEQ ID NO: 23960 - protein, 99 aa, Homo sapiens
AASGFTFSAYYMDWVRQAPGKGLEWVGRIRTNARGYTTEYAASAKGRFTISRDDSKNSLYLQMNSLTTADTAVYFCARGPLLGDAYDVWGQGTMVTVSS

SEQ ID NO: 23961 - protein, 99 aa, Homo sapiens
AASGFTFSDYYMDWVRQAPGKGLEWVGRIRTNARRYTTEYAASAKGRFTISRDDSKNSLYLQMNSLSTADTAVYFCARGPLLGDAYDVWGQGTMVTVSS

SEQ ID NO: 23962 - protein, 99 aa, Homo sapiens
AASGFTFSAHYMDWVRQAPGKGLEWVGRIRNKDRRYTTEYAASVKGRFTISRDDSKNSLYLQMNSLSTEDTAVYFCARGPLLGDAYDVWGQGTMVTVSS

SEQ ID NO: 23963 - protein, 99 aa, Homo sapiens
AASGFTFSDHYMDWVRQAPGKGLEWVGRTRNKARSYTTEYAAFVKGRFTISRDDSKNSLFLQMNSLNTEDTAVYFCARGPLLGDAYDVWGQGTMVTVSS

SEQ ID NO: 23964 - protein, 99 aa, Homo sapiens
AASGFIFSAYYMDWVRQVPGKGLEWVGRIRTKAKGYTTEYAASVKGRFIVSRDDSQNSLYLQMNSLKTEDTAVYFCARGPLLGDAYDVWGQGTMVSVSS

SEQ ID NO: 23965 - protein, 99 aa, Homo sapiens
ASGYTFTNYDIHWVRQATGQGLEWMGWMHPKTGNTGYAQKFQGRVIMTRTNSITTAYMELSSLRPEDTAVYYCARADSSGWYGGGMDVWGQGTTVIVSS

SEQ ID NO: 23966 - protein, 99 aa, Homo sapiens
AAGYTFRNYDIHWVRQATGQGLEWMGWVSPKSGNTGSAQNFQGRFSMTRNTATSTAYMELSSLRSEDTAIYYCARADSSGWYGGGMDVWGQGTTVTVSS

SEQ ID NO: 23967 - protein, 92 aa, Homo sapiens
AASGFTFSTYWMSWVRQAPGKGLEWVAKIKEDGSEKYYVDSVKGRFTISRDNAKNSLYLQMNSLRAEDTAVYYCAKGWGSSWGQGTLVTVSS

SEQ ID NO: 23968 - protein, 92 aa, Homo sapiens
AASGFTFSNAWMSWVRQAPGKGLEWVAKIKEDGSEKYYVDSVKGRFTISRDNAKNSLYLQMNSLRAEDTAIYYCAKGWGSSWGQGTLVTVSS

SEQ ID NO: 23969 - protein, 95 aa, Homo sapiens
AASGFTFTSYSVNWIRQAPGKGLEWISYISSRANFIYYAESVRGRFTISRDNAKESLYLQMNSLRDEDSGVYYCVTDKDWAFDSWGQGILVTVSS

SEQ ID NO: 23970 - protein, 95 aa, Homo sapiens
AASEITFSRYTFNWVRQGPGKGLEWVSYIGGTSHNIWYADSVKGRFTISRDDVGNSVFLQMTSLRDEDTAVYYCVTDKDWAFDSWGQGTLVAVSS

SEQ ID NO: 23971 - protein, 92 aa, Homo sapiens
AASAFSLSNFDMSWVRQAPGEGLEWISYISASGRSTYYTDSVKGRLTISRDSARNSLYLQINSLRDDDTAVYYCVRGHMGLWGQGTTVIVSS

SEQ ID NO: 23972 - protein, 92 aa, Homo sapiens
AASGFTLSNVDMNWVRQAPGKRLEWFSYISGRSGATYYADSVRGRFTISRDSARNSLHLQMNSLRAEDTAVYYCVRGHMGLWGQGTTVTVSS

SEQ ID NO: 23973 - protein, 92 aa, Homo sapiens
AASAFSLSNYDMSWVRQAPGEGLEWISYISASGRATYYTDSVKGRLTISRDSARNSLYLQINSLRDDDTAVYYCVRGHMGLWGQGTTVIVSS

SEQ ID NO: 23974 - protein, 92 aa, Homo sapiens
TVSGGSISSDYWQWIRQPPGEGLEWIGYIYNSGNINYNPSLKSRVTISVDTSKNQFSLKMSSVTAADTAVYYCTRGRWSDPWGQGTLVTVSS

SEQ ID NO: 23975 - protein, 91 aa, Homo sapiens
VSGDSISSNYWSWIRQPPGKGLEWIGYIYNSGTTYYNPSLKSRVTISVDTSKNQFSLNLTSATAADTAVYYCTRGRWSDPWGQGTLVTVSS

SEQ ID NO: 23976 - protein, 95 aa, Homo sapiens
AAPGFTFSKYWMHWVRQAPGKGLVWVSRITSDGNIANYADSVRGRFTISRDNAKNTLYLQMNSLRVEDTAVYYCARAWNYGMDVWGQGTTVSVSS

SEQ ID NO: 23977 - protein, 95 aa, Homo sapiens
AASGFTFSHYWMHWVRQAPGKGLVWVSRVTSDGRITIYADSVKGRFTISRDNARNTLYLQMDSLRADDTAVYYCARAWNYGMDVWGQGTTVTVSS

SEQ ID NO: 23978 - protein, 95 aa, Homo sapiens
AASGFTFSHYWMHWVRQAPGKGLVWVSRVTSDGRITIYADSVRGRFTISRDNARNTLYLQMDSLRADDTAVYYCARAWNYGMDVWGQGTTVTVSS

SEQ ID NO: 23979 - protein, 95 aa, Homo sapiens
ASGYPFTTYYMHWVRQAPGQGLEWMGIIKPSGGSTRYAQKFRGRVTMTRDTSTTTVFMELSSLRSEDTAVYYCVRELDGGYFDYWGQGTLVTVSS

SEQ ID NO: 23980 - protein, 95 aa, Homo sapiens
ASGYTFTRYYMHWVRQAPGQGLEWMGIIKGGDGNTGYAQKFQGRVTMTRDTSTSTVYMELSGLRSEDTAVYYCVRELDGGYFDYCGQGTLVTVSS

SEQ ID NO: 23981 - protein, 92 aa, Homo sapiens
TVSGGSVSTINDHWGWIRQPPGKGLEWIGYFYSSGVTNYNPSLKSRVTISLDTSKNQFSLKLSSMTAADTAIYYCARGVAFWGQGILVTVSS

SEQ ID NO: 23982 - protein, 92 aa, Homo sapiens
TVSGGSVSTTNDHWGWIRQPPGKGLEWIGYFYSSGVTNYNPSLKSRVTISLDTSKNQFSLKLSSMTAADTAIYYCARGVAFWGQGILVTVSS

SEQ ID NO: 23983 - protein, 92 aa, Homo sapiens
TVSGGSISSGNYHWNWIRQPAGKGLEWIGRIYGSGNANYNPSLMSRVTISLDTSKNQFSLKLSSVTAADTAVYYCARGVAFWGQGTLVTVSS

SEQ ID NO: 23984 - protein, 92 aa, Homo sapiens
TVSGGSISSGNYHWNWIRQPAGKGLEWIGRIYGSGNANYNPSLMSRVTISLDTSKNQFSLKLNSVTAADTAVYYCARGVAFWGQGTLITVSS

SEQ ID NO: 23985 - protein, 95 aa, Homo sapiens
AASGFDFSGSAMHWVRQASGRGLEWLGRIRGKANSYATSLAAPVKGRFIVSRDDSKNTAYLEMTSLKTEDTAVYYCTCGYGRFDYWGQGTLVTVS

SEQ ID NO: 23986 - protein, 95 aa, Homo sapiens
VASGFNFSGSAMHWVRQASGKGLEWLGRIRGKANNYATTHAAPVRGRFTISRDDSRNTAYLQMNSLKTEDTAVYYCTCGYGRFDYWGLGILVTVS

SEQ ID NO: 23987 - protein, 96 aa, Homo sapiens
AASGFTFSGSAMYWVRQASGKGLEWVGRIRSKANNYTTAYAVSVKGRFTISRDDSKNTAYLQMNSLKTDDTAVYYCTCGYGRFDYWGQGSLVTVSS

SEQ ID NO: 23988 - protein, 92 aa, Homo sapiens
SVSGGSISSFYWSWIRQPPNMGLEWIAYISSDGRTNYNPSLKSRVTMSVDTSKNQFSLRLTSVTAADTAIYYCARAPDHDYWGQGTLVTVSS

SEQ ID NO: 23989 - protein, 91 aa, Homo sapiens
VFGISLNSYYWSWIRQSPGKGLEWIGYIDYGGSAKYNPSLKSRVTMSLDTSQNQFSLKLSSVTGTDTAIYYCARAPDHDYWGQGSLVTVSS

SEQ ID NO: 23990 - protein, 91 aa, Homo sapiens
VFGISLNSYYWSWIRQSPGKGLEWIGYIDYSGSANYNPSLKSRVTMSVDTAENQFSLKLSSVTGADTAVYYCARAPDHDYWGQGSLVTVSS

SEQ ID NO: 23991 - protein, 99 aa, Homo sapiens
AASGFTFNEYAMHWVRQAPGKGLEWVSGISWNSNNIGYADSVKGRFTISRDNAKNSLFLQMNSLRAEDTALYYCARGDYRGSGGHADYWGQGILVTVSS

SEQ ID NO: 23992 - protein, 99 aa, Homo sapiens
AASGFSFDDYAMHWVRQAPGKGLEWVSGISWKSRNIDYAVSVKGRFTISRDNAKNSLYLEMNGLRPDDTALYYCARGDYRGSGGHADYWGQGTLVTVSS

SEQ ID NO: 23993 - protein, 99 aa, Homo sapiens
AASGFTFNDYAMHWVRQTPGKGLEWVSVISWNSDNLGYAGSVRGRFTISRDDVKNSLYLQMNSLSIDDTALYYCARGDYRGSGGHADYWGQGTLVTVSS

SEQ ID NO: 23994 - protein, 97 aa, Homo sapiens
LSGGSVTNTDFYWDWIRQSPGQGLEWIGSIDYSGATDYNPSLRGRVTLSVDTSNNRFSLRLTSVTTADTSVYYCARRGPYFYGFDVWGQGTTVIVSS

SEQ ID NO: 23995 - protein, 98 aa, Homo sapiens
TVSGGSISNSDYYWDWIRQTPGKGLEWIATIDYTGDTRYTPSLKARVTSSIDTSRNHFSLTVTSVTAADTAVYFCARRGPYFYGFDVWGQGTTVTVSS

SEQ ID NO: 23996 - protein, 93 aa, Homo sapiens
TVSGGSMSDNHWSWIRQPPGEALEWIGYIHSSGTTNYNPSLMGRVTISADTSKNQFSLKLSSVTAADTAVYHCASGAGWWQYWGQGTLVTVSS

SEQ ID NO: 23997 - protein, 92 aa, Homo sapiens
TVSGGSLSLYYWSWIRQSPGMGLEWIGYISYSGTTNYYPSLKSRVSISIDTSTNQFSLRLNSVTSADTAIYYCASGAGWWQYWGRGALVTVS

SEQ ID NO: 23998 - protein, 92 aa, Homo sapiens; identical to SEQ ID NO: 23997

SEQ ID NO: 23999 - protein, 98 aa, Homo sapiens
ASGFTFSSSTIHWVRQARGQRLEWIGWIAVGSGNTNYAQQFQGRVTITRDMSTSTAYMEVSSLRSEDTAVYYCAAERYDGSCCWFDPWGQGTLVTVSS

SEQ ID NO: 24000 - protein, 98 aa, Homo sapiens
ASGFTFSGSTIQWIRQARGQGLEWIGYMVIGNGITKYAEKVQERVTFIRDMSTTTVYMELSSLRAGDTAVYYCAAERYDGSCCWFDPWGQGTLVTVSS

SEQ ID NO: 24001 - protein, 95 aa, Homo sapiens
ASGYTFNNFAVNWVRQAPGQGLEYMGWINTNSGNPTYAQGFAGRFVFSLDTSVSTAYLQINTLEAEDTAVYYCARASSSWSIDYWGQGTLVTASS

SEQ ID NO: 24002 - protein, 95 aa, Homo sapiens
ASGYTFTNYAINWVRQAPGQGLEWMGWINTNTGSPDYAQGFTGRFVFSLDTSVSTAYLQISTLKAEDTAVYFCARASSSWSIDYWGQGTLVTVSS

SEQ ID NO: 24003 - protein, 97 aa, Homo sapiens
AASGFTFSSYGMHWVRQAPGKGLEWVAVIWYDGSKKYYTDSVKGRFTISRDNSKNTLYLQMNTLRGEDTAVYYCARYRYSESYFDYWGQGTLVTVSS

SEQ ID NO: 24004 - protein, 97 aa, Homo sapiens
AASGFTFSNYGMHWVRQAPGKGLEWVAAIWFDGSKKYFADSVKGRFTISRDNSKKTLYLQMNSLRVEDTAVYYCARYRYSESYFDYWGQGTLVTISS

SEQ ID NO: 24005 - protein, 96 aa, Homo sapiens
AASGFSFINYWMTWVRQAPGKGLEWVASIKPDGSEQKYVDSVKGRFTISRDNAKNSLFLHMNSLRADDTAFYYCARAQGWGRFDSWGQGTLVTVSS

SEQ ID NO: 24006 - protein, 96 aa, Homo sapiens
AASEFTFSSFWMTWIRQAPGKGLEWVASIKFDGSDKKYLDSVEGRFIISRDNAKNSLSLQMNSLRVEDTAVYYCARAQGWGRFDSWGQGTLVTVSS

SEQ ID NO: 24007 - protein, 96 aa, Homo sapiens
VASGFTFSDYWMTWVRQAPGKGLQWVASVKYDGSERRHADSVKGRLTSSRDNARNSLYLQMNSLRVEDTAIYYCARAQGWGRFDSWGQGTLVTVSS

SEQ ID NO: 24008 - protein, 96 aa, Homo sapiens
VASGFTFSDYWMTWVRQAPGKGLQWVASVKYDGTEKRHVDSVKGRLTCSRDNARNALYLEMNSLRVEDTAIYYCARAQGWGRFDSWGRGTLVAVSS

SEQ ID NO: 24009 - protein, 96 aa, Homo sapiens
AASGFTFSDYWMTWVRQAPGKGLQWVASVKYDGTEKRHVDSVKGRLTCSRDNARNSLYLQMNSLRVEDTAIYYCARAQGWGRFDSWGQGTLVAVSS

SEQ ID NO: 24010 - protein, 96 aa, Homo sapiens
VASGFTFSDYWMTWVRQAPGKGLQWVASVKYDGSERRHADSVKGRLTSSRDNAGNSLYLQMNSLRVEDTAIYYCARAQGWGRFDSWGQGTLVTVSS

SEQ ID NO: 24011 - protein, 96 aa, Homo sapiens
VASGFTFSDYWMTWIRQAPGKGLQWVASVKYDGSQRRHAGSVEGRLTSSRDNARNSLYLQMNSLRVEDTAIYYCARAQGWGRFDSWGQGTLVTVSS

SEQ ID NO: 24012 - protein, 96 aa, Homo sapiens; identical to SEQ ID NO: 24011

SEQ ID NO: 24013 - protein, 96 aa, Homo sapiens; identical to SEQ ID NO: 24007

SEQ ID NO: 24014 - protein, 92 aa, Homo sapiens
GVYGGSLSGHYWHWFRQPPGKGLEWIGETTLSGGPNYNPSLKSRVTISLDTSKNQFSLKLNSVTAADTAVYYCAGRWHFDLWGRGTLVTVSS

SEQ ID NO: 24015 - protein, 92 aa, Homo sapiens
AVDGGSLRGHFWHWMRQPPGKGLEWIGQISQSGDTKFNPSLKSRVTISIDTSNDQLSLKLTSVTAADTAVYYCAGRWHFDLWGRGTLVTVSS

SEQ ID NO: 24016 - protein, 96 aa, Homo sapiens
AASGFTFSNYWMSWVRQAPGKGLEWVANINQAGSEEYYVDSVKGRFTISRDNAKNSLSLQMNSLRAEDTAVFYCARAGATGTTDYWGQGSLVTVSS

SEQ ID NO: 24017 - protein, 96 aa, Homo sapiens
AASGFTFSSYWMSWVRQAPGKGLEWVANINQDGSEKYYVDSVKGRFTISRDNAENSLYLQMNSLRAEDTAVYYCARAGATGTTDYWGQGTLVTVSS

SEQ ID NO: 24018 - protein, 91 aa, Homo sapiens
VASGFSFSDYWMNWVRQAPGKGLEWVASIRQDGSLKHYMDSVKGRFTISRDNAKNSLYLQMNSLRSEDAAVYFCAASFDHWGQGTLVTVSS

SEQ ID NO: 24019 - protein, 91 aa, Homo sapiens
VGTGFGFRDYWMNWVRQAPGRGLEWVGNMNQDGSIKSYVDSVKGRFTIFRDNAKNSVYLQMNSLRAEDTAVYYCAASFDHWGHGTLVTVSS

SEQ ID NO: 24020 - protein, 91 aa, Homo sapiens; identical to SEQ ID NO: 24019

SEQ ID NO: 24021 - protein, 93 aa, Homo sapiens
AASGFTLSSHWMQWVRQVPGKGLVWVSHINGDGRIINYADSVKGRFTMSRDNAKNTLYLQMNSLRAEDTAVYYCVRDSSASCWGQGTLVTVSS

SEQ ID NO: 24022 - protein, 93 aa, Homo sapiens
AASGFTLSSHWMHWVRQAPGKGLVWVSHINSDGTAIRYADSVKGRFTISRDNAKNTLYLQMNSLRAEDTAIYYCVRDSSASCWGQGALVTVSS

SEQ ID NO: 24023 - protein, 93 aa, Homo sapiens
AASGFTFSAHWMYWVRQPPGKGLVWVSRMNGDGTYIDYAESVEGRFTISRDNAKNTLYLHMNALRVEDTAVYYCVRDSSASCWGQGTLVTVSS

SEQ ID NO: 24024 - protein, 99 aa, Homo sapiens
AGAGFTFSNYAMTWVRQAPGKGLEWVSIISGGGASIFYAASVKGRFTISRDNSKNTLYLQMNSLRAEDTAVYYCAKGSAPGDRYYFDYWGQGTLVTVSS

SEQ ID NO: 24025 - protein, 99 aa, Homo sapiens
AASGFTFRNYAMSWVRQAPGKGLEWVSVISGGSASIFYADSVKGRFTISRDNSRNTLYLQLNSLRAEDTAVYYCAKGSAPGDRYYFDYWGQGSPVTVSS

SEQ ID NO: 24026 - protein, 99 aa, Homo sapiens
AGVGFTFSNYAMTWVRQAPGKGLEWVSIISGGGASIFYAASVKGRFTISRDNSKNTLYLQMNSLRAEDTAVYYCAKGSAPGDRYYFDYWGQGTLVTVSS

SEQ ID NO: 24027 - protein, 99 aa, Homo sapiens
AVSGFIFDDYAMHWVRQAPGKGLEWVSAISWNSGVIGYADSVKGRFTISRDNAKNSLYLQMNSLRTDDTAFYYCARGDYRGAGGYSDYWGQGTLVTVSS

SEQ ID NO: 24028 - protein, 99 aa, Homo sapiens
AVSGFIFDDYAMHWVRQAPGKGLEWVSAISWNSSVIGYADSVKGRFTISRDNAKNSLYLQMNSLRTDDTAFYYCARGDYRGAGGYSDYWGQGTLVTVSS

SEQ ID NO: 24029 - protein, 99 aa, Homo sapiens
EGSGFTFEDYAMHWVRQAPGKGLEWVSAISWTGIYIGYADSVKGRFTISRDNAKKSLYLQMNSLRTEDTALYYCARGDYRGAGGYSDYWGQGTPVTVSS

SEQ ID NO: 24030 - protein, 93 aa, Homo sapiens
TVSGGSVSSSNYYWGWIRQPPGKGLEWIGNIYYSGSTYYNPSLKSRVTISINTSKNQFSLKLSSVTAADTAVYYCAVFQGDYWGQGTLVTVSS

SEQ ID NO: 24031 - protein, 93 aa, Homo sapiens
SVSGGSINSTSYYWGWIRQPPGKGLEWVGTIYYNGNTYYNPSLKSRATVAVDMSKNHYSLTLNSVTAADTAVYYCAVFQGDYWGQGILVTVSS

SEQ ID NO: 24032 - protein, 93 aa, Homo sapiens
ASGYTFTDYALNWLRQAPGQGPEWMGWINTNTGNPTYAQGFTGRFVFSLDTSVSTAFLQISNLKTEDTAVYYCARDRGSGDYWGQGTLVTVSS

SEQ ID NO: 24033 - protein, 93 aa, Homo sapiens
ASGYIFTSYPMNWVRQAPGQGLEWMGWINTNTGNPTYAQGFTGRFVFSLDTSVSTAYLQISSLKAEDTAFYYCARDRGSGDYWGQGTLVTVSS

SEQ ID NO: 24034 - protein, 96 aa, Homo sapiens
TVSGGSINNYYWSWFRQPAGKGLEWIGRIYTSGSTNYNPSLKSRVTMSIDTSKNQFSLKLNSVTAADTAVYYCARTSPRYGGFDYWGQGTLVTVSS

SEQ ID NO: 24035 - protein, 95 aa, Homo sapiens
TVSGGSISSYYWSWIRQPAGKGLEWIGRIYSSGSTNYNPSLKSRVTMSVDTSKNQFSLKVNSVTAADTAVYYCARTSPRYGGFDYWGQGTLVTVS

SEQ ID NO: 24036 - protein, 95 aa, Homo sapiens; identical to SEQ ID NO: 24035

SEQ ID NO: 24037 - protein, 98 aa, Homo sapiens
AVSGFTFSDAWMNWVRQAPGKGLEWVGRSKKRSDGGTIDYTAPVKGRFTISRDDSKDTLYLEMNSLKIEDTAVYYCTTELTYGDKFHWGQGTLVTVSS

SEQ ID NO: 24038 - protein, 99 aa, Homo sapiens
AASGFTFSRHNWMNWVRQAPGKGLEWVGRIKTKSEGGTTDYGAPVKGRFSISRDDSRDILYLQMNSLKSEDTALYYCTTELTYGDKFHWGQGALVTVSS

SEQ ID NO: 24039 - protein, 100 aa, Homo sapiens
KGSGYSFTSHWIGWVRQMPGKGLELMGIIYASDSDTRYSPSFQGQVTISADKSINTAYLQWSSLKASDSAMYYCARFGGNSGWYGGFDYWGQGTLVTVSS

SEQ ID NO: 24040 - protein, 100 aa, Homo sapiens
KGSGYSFTSHWIAWVRQMPGKGLELMGIIYASDSDTRYSPSFQGQVTISADKSINTAYLQWSSLKASDTAMYYCARFGGNSGWYGGFDYWGQGTLVTVSS

SEQ ID NO: 24041 - protein, 100 aa, Homo sapiens
KGSGYSFTSHWIGWVRQMPGKGLELMGIIYASDSDTRYSPSFQGQVTISADKSINTAYLQWSSLKASDTAMYYCARFGGNSGWYGGFDYWGQGTLVTVSS

SEQ ID NO: 24042 - protein, 99 aa, Homo sapiens
KGSGYSFTTHWIGWVRQLPGKGLECMGIIYPGDSDTRYSPSFQGQVTISADKSISTAYLQWSSLKASDTAIYYCARFGGNSGWYGGFDYWGQGTLVTVS

SEQ ID NO: 24043 - protein, 99 aa, Homo sapiens
KGSGYSFTTHWIGWVRQMPGKGLECMGIIYPGDSDTRYSPSFQGQVTISADKSISTAYLQWSSLKASDTAIYYCARFGGNSGWYGGFDYWGQGTLVTVS

SEQ ID NO: 24044 - protein, 99 aa, Homo sapiens
KGSGYSFTTHWIGWVRQMPGKGLECMGIIYPGDSDTRYTPSFQGQVTISADKSISTAYLQWSSLKASDTAIYYCARFGGNSGWYGGFDYWGQGTLVTVS

SEQ ID NO: 24045 - protein, 99 aa, Homo sapiens
KGSGYSFTTHWIAWVRQMPGRGLECMGIIYPGDSDTRYSPSFQGQVTISADKSINTAYLQWSTLKASDTAIYYCARFGGNSGWYGGFDYWGQGALVTVS

SEQ ID NO: 24046 - protein, 92 aa, Homo sapiens
FGYTFTSYDINWVRQATGQGLEWLGWMNPNSGNTGYTQKFQDRVAMTRNTSISTAYMELSSLRPEDTAVYYCARGSRSFDYWGQGTLVTVSS

SEQ ID NO: 24047 - protein, 93 aa, Homo sapiens
ASGYTFSSYDLNWVRQATGQGLEWMGWMNPNSGNTGYAQNFQGRVTMTWNTSMSTAYMELSSLRSDDTAMYYCARGSRSFDYWGQGTLVTVSS

SEQ ID NO: 24048 - protein, 95 aa, Homo sapiens
AASGFTFSNYWMTWARQAPGKGLAWVARINPDGSEKYIVDSVKGRFTVSRDNAKNSLYLQMNSLRAEDTAVYYCARAGSGWFNYWGQGTLVTVSS

SEQ ID NO: 24049 - protein, 95 aa, Homo sapiens
AASGFIFSRYWMSWVRQAPGKGLEWVANINEDGSEKKYVDSVKGRFTISRDNAKNSLYLQMNSLRAEDTAVYYCARAGSGWFNYWGQGTLVTDSS

SEQ ID NO: 24050 - protein, 95 aa, Homo sapiens
AASGFTFSSYWMSWVRQAPGKGLEWVANIKEDGSEKYYGDSVKGRFTISRDNAKNSLYLQMNSLRAEDTAVYYCARAGSGWFNYWGQGTLVTDSS

SEQ ID NO: 24051 - protein, 95 aa, Homo sapiens
AASGFTFSSYWMSWVRQAPGKGLEWVANIKEDGSEKYYVDSVKGRFTISRDNAKNSLYLQMNSLRVEDTAVYYCARAGSGWFNYWGQGTLVTDSS

SEQ ID NO: 24052 - protein, 98 aa, Homo sapiens
AASGFTFSSFAMSWVRQAPGKGLEWVSSISGGAAGTYYADTVKGRFTISRDTSNNTLYLQLSSLKVEDTAIYYCAKARSEVVAAANNYWGQGILVTVS

SEQ ID NO: 24053 - protein, 98 aa, Homo sapiens
ASGFTFNNYAMSWVRQAPGKGLEWVSVISGSGDSTYYADSVKGRLTISRDNSRNTLYLQMNSLRAEDTAVYFCAKARSEVVAAANNYWGQGTLVTVSS

SEQ ID NO: 24054 - protein, 92 aa, Homo sapiens
AASGFTFSSYEMNWVRQAPGKGLEWVSYISSSSSITHYADSVKGRFTISRDNAKNSLYLQMNSLRAEDTAVYYCARDRFAYWGQGTLVTVSS

SEQ ID NO: 24055 - protein, 92 aa, Homo sapiens
AASGFTFNNYEMNWVRQAPGKGLEWVSYISSSGSTIYYADSVKGRFTISRDNAKNSLYLQMNSLRAEDTAIYYCARDRFAYWGQGTLVTVSS

SEQ ID NO: 24056 - protein, 91 aa, Homo sapiens
AAGFSFNTYVMTWVRQAPGKGLEWVSFIYGDGTTYYVDSVKGRFTVSRDNSKNTMFLEMNSLRVDDTAIYYCAKGGWVDSWGRGSLVIVSS

SEQ ID NO: 24057 - protein, 93 aa, Homo sapiens
AASGFNFSGYDMTWVRQIPGKGLDWVSYINTPGDYTYYADSVKGRFTISRDNSRNTLHLQMNSLRVEDTAIYYCAKGGWVDSCGQGTLVTVSS

SEQ ID NO: 24058 - protein, 94 aa, Homo sapiens
EGSGFTFSSYGMSWVRQAPGKGLEWVASVSGGAIDIHYADSVRGRFTISRDNSKKILYLQMDSLRSDDSAIYYCAKEVPAFDLWGHGTMVTVSS

SEQ ID NO: 24059 - protein, 94 aa, Homo sapiens
EGSGFTFGSFGMSWVRHIPGKGLEWVAGISGGSVDINYADSVKGRFTISRDNGKTMVYLQMDSLRIDDSGTYFCAKEVPAFDLWGQGTTVTVSS

SEQ ID NO: 24060 - protein, 94 aa, Homo sapiens
ASGFTFSNYWMNWVRQAPGKGLEWVANIKQNGRETNYVDSVRGRFTISRDNAKNSVFLQMNSLRVEDTALYYCAGGRGWLIDFWGQGTLVTVSS

SEQ ID NO: 24061 - protein, 94 aa, Homo sapiens
ASGFTFSNYWMNWVRQAPGKGLEWVANIKQNGRETNYVDSVRGRFTISRDNAKNSVFLQMNSLRVEDTALYYCAGGRGWLIDFWGQGTLVTASS

SEQ ID NO: 24062 - protein, 95 aa, Homo sapiens
AASGFTFSTHWMSWVRQAPGKGLEWVANIKQDGSEKYYVDSVKGRFTISRDNAKNSLYLQMSSLRAEDTAVYFCAGGRGWLIDFWGQGSLVTVSS

SEQ ID NO: 24063 - protein, 95 aa, Homo sapiens
VVSGFSFSNYWMNWVRQAPGKGLEWMANIQKDGSEKNYVDSVRGRFTISRDNVKNSLYLQMNSLRDEDTAVYYCAGGRGWLIDFWGQGTLVTVSS

SEQ ID NO: 24064 - protein, 93 aa, Homo sapiens
AVSGFIFTRQDMNWVRQAPGKGLEWVAYISGDATAAYYADSVKGRFTISRDNFGNTLSLHMSSLRSEDTATYYCTRNAGLDYWSQGVLVTVSS

SEQ ID NO: 24065 - protein, 93 aa, Homo sapiens
AMSGFTFVRQDLNWIRQAPGKGLEWVASIDGTGYATYYADPVKGRFTISRDNTENTLYLQMNTLRAEDTAVYYCTRNAGLDYWGQGTLVTVSS

SEQ ID NO: 24066 - protein, 93 aa, Homo sapiens
AMSGFTFVRQDLNWIRQAPGKGLEWVASIDGTGYATYYADPVKGRFTISRDNTENMLYLQMSRLRAEDTAVYYCTRNAGLDYWGQGTLVTVSS

SEQ ID NO: 24067 - protein, 93 aa, Homo sapiens
AAFGFTFTSQAMNWVRQAPGKGLEWVSTVTGSGGGTYYADSVKGRFTISRDNSRNTVSLQMTSLRAEDTAVYFCTRNAGLDYWGQGTLVTVSS

SEQ ID NO: 24068 - protein, 91 aa, Homo sapiens
AASGFTFSSYTMNWVRQAPGKGLEWVSSITPSGGYINYADSVKGRFTISRDNAKKSLSLQMNSLRAEDTAVYYCASVRGHWGQGALVTVSS

SEQ ID NO: 24069 - protein, 91 aa, Homo sapiens
AASRFTFSDYSMNWVRQAPGKGLEWVSSIRGDSNFIYYSDSVKGRFTISRDNAKNSLYLQMDSLRAEDTAIYYCASVRGHWGQGTLVTVSS

SEQ ID NO: 24070 - protein, 91 aa, Homo sapiens
AASGFTFSGYTMTWVRQAPGKGLVWVSSIGVSGGSIFYADSVKGRFTISRDNAKTSLYLQMDSLRAEDTAVYFCASVRGHWGQGTLVTVSS

SEQ ID NO: 24071 - protein, 91 aa, Homo sapiens; identical to SEQ ID NO: 24070

SEQ ID NO: 24072 - protein, 94 aa, Homo sapiens
AASGFTFDDYAMHWVRQAPGKGLEWVSSISWNSGSIGYVDSVKGRFTISRDNAKSSLYLQMNSLRPEDTALYYCARSRYGMDVWGQGTTVTVSS

SEQ ID NO: 24073 - protein, 94 aa, Homo sapiens; identical to SEQ ID NO: 24072

SEQ ID NO: 24074 - protein, 94 aa, Homo sapiens
AASGFTFDDYAMHWVRQAPGKGLEWVSSISWNSGSIGYVDSVKGRFTISRDNAKNSLYLQMNSLRPEDTALYYCARSRYGMDVWGQGTTVTVSS

SEQ ID NO: 24075 - protein, 94 aa, Homo sapiens
AGSGFTFDDYAMHWVRQVPGKGPEWVSSISWNSGNIGYADSVKDRFTISRDNAKNSLYLEMNSLRTEDTALYYCARSRYGMDVWGQGTTVTVSS

SEQ ID NO: 24076 - protein, 94 aa, Homo sapiens
AGSGFTFDDYAMHWVRQVPGKGLEWVSSISWNSGNIGYADSVKDRFTISRDNAKNSLYLEMNSLRTEDTALYYCARSRYGMDVWGQGTTVTVSS

SEQ ID NO: 24077 - protein, 94 aa, Homo sapiens; identical to SEQ ID NO: 24075

SEQ ID NO: 24078 - protein, 94 aa, Homo sapiens
VGSGFSFDDYAMHWVRQVPGKGPEWVSSISWNSGNIGYADSVKDRFTISRDNAKNSLYLQMNSLRTEDTALYYCARSRYGMDVWGQGTTVTVSS

SEQ ID NO: 24079 - protein, 94 aa, Homo sapiens; identical to SEQ ID NO: 24078

SEQ ID NO: 24080 - protein, 94 aa, Homo sapiens; identical to SEQ ID NO: 24076

SEQ ID NO: 24081 - protein, 94 aa, Homo sapiens
AASGFSFDDYAMHWVRQGPGKGLEWVSSISWDGGSTGYADSVKGRFTISRDNAKNSLYLEMNSLRAEDTALYYCARSRYGMDVWGQGTTVTVSS

SEQ ID NO: 24082 - protein, 100 aa, Homo sapiens
AASGFIFRNYAMSWVRQAPGKGLEWVSVIYSGDFSTHYADSVKGRFTISRDNSKNMVYLEMNSLRAEDTAVYYCAKDLDASGWYLYFQHWGQGTLVTVSS

SEQ ID NO: 24083 - protein, 99 aa, Homo sapiens
AASGFTFSNYAMSWVRQAPGKGLEWVSVIYSGDSTTYYADSVEGRFTISRDNSKNTLYLHMNSLRAEDTAVYYCAKDLDASGWYLYFQHWGQGTLVTVS

SEQ ID NO: 24084 - protein, 100 aa, Homo sapiens
AGSGFTLTEYAMNWVRQAPGKGLEWVSTISASGHRTYYADSVKGRFTISRDTSKNTVYLQMNSLRADDTAVYYCAKDRYCPGGICPTDYWGQGTRVTVSS

SEQ ID NO: 24085 - protein, 100 aa, Homo sapiens
AASGFALTEYAMNWVRQAPGKGLEWVSTMSASGGITDYADSVKGRFTISRDTSKHTVYLQMNSLRADDSAVYYCAKDRYCPGGICPTDYWGRGTLVTVSS

SEQ ID NO: 24086 - protein, 93 aa, Homo sapiens
AGSGFIVSQNWMQWVRQAPGKGPVWVSRISSDGLSTAYADSVKGRFTISRDSATNTLFLQMNSLRVEDTAVYYCVKDSSASYWGQGTLVTVSS

SEQ ID NO: 24087 - protein, 93 aa, Homo sapiens
EVSGFTLSNHWMYWVRQAPGKGLEWVSRINTDGSSTNYADSVKGRFTVSRDNAKNTLYLQMDSLRAEDTAIYYCVKDSSASYWGQGTLVTVSS

SEQ ID NO: 24088 - protein, 93 aa, Homo sapiens
AASGFTFSSNWMQWVRQVPGKGLVWVSRINTDGRSTEYAASVKGRFTISRDNAKSTLYLQMNSLRAEDTAVYYCVKDSSASYWGQGTLVTVSS

SEQ ID NO: 24089 - protein, 97 aa, Homo sapiens
AASRFGFSTYAMHWVRRAPGKGLEWVAAISFHGKNTYYLDSVKGRFTISRDNSKNTLYLQMNSLRAEDTAVYYCARGHYDSSAVDYWGQGTLVTVSS

SEQ ID NO: 24090 - protein, 97 aa, Homo sapiens; identical to SEQ ID NO: 24089

SEQ ID NO: 24091 - protein, 97 aa, Homo sapiens
AASKFAFSTYAMHWVRQAPGKGLEWVALISFNGRNEYYADSVQGRFAISRDNSKNTLFLQMNSLRTEDTAVYYCARGHYDSSAVDYWGQGTLVTVSS

SEQ ID NO: 24092 - protein, 101 aa, Homo sapiens
AASGFSVSNYDMHWVRQSTGKGLEWVSALGPGGSIFYPDSVKGRFTISRENAKNSLYLQMNSLRPGDTAVYYCARGGGYGGNPLYWYFDLWGRGTLVTVSS

SEQ ID NO: 24093 - protein, 101 aa, Homo sapiens
AASGFTLSSYDMHWVRQVEGRGLEWVSALGPAGDTYYPGSVKGRFTVSRESAKNSLYLQMNSLSAGDTAVYYCARGGGYGGNPLYWYFDLWGRGTLVTVSS

SEQ ID NO: 24094 - protein, 100 aa, Homo sapiens
AASGFTLSNYDMHWVRHATGKGLEWVSTLGPAGDTYYPGSVKGRFTISRENAKNSVYLQMNSLRAGDTAVYYCARGGGYGGNPLYWYFDLWGRGTLVTVS

SEQ ID NO: 24095 - protein, 93 aa, Homo sapiens
AASGFTFSNYWMSWVRQAPGKGLEWVANIKQDGSEIYYVDSVKGRFTISRDNAKNSLYLQMNSLRAEDTAVYYCARKNVFDIWGQGTMVTVSS

SEQ ID NO: 24096 - protein, 93 aa, Homo sapiens
AASGFIFSRFWMSWVRQAPGKGLEWVANIKQDGSEKYYVDSVKGRFTISRDNAKNSLYLEMNSLRAEDTAVYYCARKNVFDIWGHGTMVTVSS

SEQ ID NO: 24097 - protein, 94 aa, Homo sapiens
AASGFTFSSSWMTWVRQAPGKGLEWVANIKEAGSESHYVDSVKGRFTITRDNTNNSVYLQVSSLRAEDTAVYYCARGRFSFDSWGQGIPVTISS

SEQ ID NO: 24098 - protein, 94 aa, Homo sapiens
AASGFTFNNYWMTWVRRAPGKGLEWVANIKQGGTEKNYVDSVKGRFTISRDNANNSLLLQLNSLRVEDTAVYYCARGRFSFDSWGQGTLVTVSS

SEQ ID NO: 24099 - protein, 100 aa, Homo sapiens
ASGFSFSNYYMNWVRQAPGKGLEWVSGVSGDSDRIYYGHSVRGRFTVSRENAKNSLYLQLNNLRAEDTGVYYCARDLDRSDWYGGYFDSWGQGTLVLVSS

SEQ ID NO: 24100 - protein, 101 aa, Homo sapiens
AASGFTFSNYYMNWVRQAPGKGLEWVSSITGSSSYRYYTDSVKGRFTISRDNAKNSLYLQMNSLRAEDTAVYYCARDLDRSDWYGGYFDSWGQGSLVTVSS

SEQ ID NO: 24101 - protein, 100 aa, Homo sapiens
ASGFTFSSTFMNWVRQAPGKGLEWVSCISSSGSRIYYADSAKGRFTISRDDAKNSLYLQMNSLRVEDTAVYYCARDLDRSDWYGGYFDSWGQGTLVTVAS

SEQ ID NO: 24102 - protein, 101 aa, Homo sapiens
AASGFMFSSYFMNWVRRAPGKGLEWVSVISSSGSSIYYADSVKGRFTISRDNAKNSLYLQMNSLRAEDTGVYYCARDLDRSDWYGGYFDSWGQGTLITVSS

SEQ ID NO: 24103 - protein, 99 aa, Homo sapiens
AASGFTFSSYAMSWVRQAPGKGLEWVSAISGSGGSTYYADSVKGRFTISRDNSQNTLFLQMSSLRAEDTAVYYCAKDQYSGYGGLFDYWGQGTLVTVSS

SEQ ID NO: 24104 - protein, 99 aa, Homo sapiens
EASGFTFSSYAMTWVRQAPGKGLEWVSGINDSGGRTYYADSVKGRFTISRDNSKNTLYLQMNSLRAEDTAVYYCAKDQYSGYGGLFDYWGQGTLVTVSS

SEQ ID NO: 24105 - protein, 98 aa, Homo sapiens
AASGFAFNAHWMSWVRQAPGKGLEWVANINQDGGEKYYVDSVKGRFAISRDNAKNSLYLQMSGLRAEDTAVYYCARDHVGPGVYFDYWGQGALVTVSS

SEQ ID NO: 24106 - protein, 98 aa, Homo sapiens
AASGFTFSSYWMNWVRQAPGKGLEWVANINQDGSEKYYVDSVKGRFTISRDNARNSLYLQMNSLRAEDTAVYYCARDHVGPGVYFDYWGQGTLVTVSS

SEQ ID NO: 24107 - protein, 95 aa, Homo sapiens
AASGFTFGSYWMTWVRQAPGKGLEWVANIKQGGGEKYYVDSVKGRFTVSRDNAKNSLYLQMNSLRAEDTAVYYCARGGPRGMDVWGQGTTVIVSS

SEQ ID NO: 24108 - protein, 95 aa, Homo sapiens
AASGFSFSIYWMSWVRQAPGKGLEWVANIIQDGSEKYYVDSVKGRFTISRDNAKNSLYLQMNSLRAEDTAVYYCARGGPRGMDVWGQGTTVTVSS

SEQ ID NO: 24109 - protein, 96 aa, Homo sapiens
AASGFTFSNYWMHWVRLAPGKGLVWVSRINEDGRDTNYADSVRGRFTVSRDNTKNTLYLQMNNLRAEDTAMYYCARGGLGLGIDYWGQGTLVTVSS

SEQ ID NO: 24110 - protein, 96 aa, Homo sapiens
AASGFTFSNYWMHWVRLAPGKGLVWVSRINEDGRDTNYADSVRGRFTISRDNTKNTLYLQMNNLRAEDTAMYYCARGGLGLGIDYWGQGTLVTVSS

SEQ ID NO: 24111 - protein, 95 aa, Homo sapiens
ASGFTFSYYWIHWVRQASGEGPVWVSRIDGDGSSTIYADSVKGRFTISRDNAKKTLYLQMNSLRAEDTAVYYCARGGLGLGIDYWGKGTLVTVSS

SEQ ID NO: 24112 - protein, 95 aa, Homo sapiens
AASGFIFTDFAMTWVRQAPGKGLEWVSSISARARGTYYTDSVRGRFTISRDNSKNTVYLQMNGLRVDDTAEYYCARGGVHYFDYCGQGTLVTVSS

SEQ ID NO: 24113 - protein, 95 aa, Homo sapiens
AASGFTFTSYAMSWVRQAPGKGLEWVSSITGSDDKTFYADSVKGRFTISRDNSKNTLFLQMNSLRAEDTAVYYCARGGVHYFDYWGQGALVTGSS

SEQ ID NO: 24114 - protein, 95 aa, Homo sapiens
AASGFTFSSYAMSWVRQAPGKGLEWVSVIYGGGSSTNYADSVKGRFTISRENSKNTLYLQMNSLRPEDTAVYYCARGGVHYFDYWGQGTLVTVSS

SEQ ID NO: 24115 - protein, 93 aa, Homo sapiens
AASGFTFGSYYLGWVRQAPGKGLEWLAYIVPDGTNKYYVDSVKGRFSISRDNARTSLYLQMNSLRVDDTAVYYCARGRDPPHWGRGTLVTVSS

SEQ ID NO: 24116 - protein, 93 aa, Homo sapiens
AASGFTFSSYWMSWVRQAPGKGLEWVANIRPDGSDKYYVDSVKGRFTISRDNAKNSLYLQMNSLRAEDTAVYYCARGRDPPHWGQGTLVTVSS

SEQ ID NO: 24117 - protein, 101 aa, Homo sapiens
AASGFSFISYGMHWVRQAPGKGLEWVAVIWYGGSRQFYADSVKGRFTISRDDPQSTLYLQMNSLRDGDTAVYHCVKGNYGDHVSGDAFDIWGQGTMVTVSS

SEQ ID NO: 24118 - protein, 101 aa, Homo sapiens
AASGFSFRSYGMHWVRQAPGKGLEWVAVIWYDGTKEYYADSGKGRFTISRDDSKNMLYLQMNSLRAEDTALYYCVKGNYGDHVSGDAFDIWGQGTMLTVSS

SEQ ID NO: 24119 - protein, 101 aa, Homo sapiens
VASGFIFSHYGMHWVRQAPGKGLEWVAVIWYDGTKKYYLDSVKGRFTISRDNSKNTLNLQMNSLRAEDTAMYFCVKGNYGDHVSGDAFDIWGQGTMVTVSS

SEQ ID NO: 24120 - protein, 102 aa, Homo sapiens
AASGFIFSAYGMHWVRQAPGKGLEWVAVIWYEDGTKKNYADSVKGRFTISRDNSKSTLQLQMNSLRAEDTAVYYCVKGNYGDHVSGDAFDIWGQGALVTVSS

SEQ ID NO: 24121 - protein, 101 aa, Homo sapiens
AASGFSFRSFGMHWVRQAPGKGLEWVAVIWYGGTKEYYADSGKGRFTISRDDSKNALYLQMNSLRVEDTALYYCVKGNYGDHVSGDAFDIWGQGTMVTVSS

SEQ ID NO: 24122 - protein, 97 aa, Homo sapiens
AASGFKFSDYYMTWVRQAPGKGLEWVANINENGRVTYLVESVRGRFTVSRDNAKTSLYLEMNSLRVEDTALYYCVRAGGPHNRFDYWGQGTLVTVSS

SEQ ID NO: 24123 - protein, 97 aa, Homo sapiens
AASGLSFSNSWMGCVRQAPGKGLEWVANINPDGSGTYYVDSVKGRFTIFRDNAKNSLYLQMDSLRPEDTAMYYCVRAGGPHNRFDYWGQGTLVTVSS

SEQ ID NO: 24124 - protein, 97 aa, Homo sapiens
ASDYTFDNYGISWVRQAPGEGLEWMGWISTHNGHTNYAQKIQGSVTMTTDTSTSTAYMELRSLRSGDTAVYYCARDKGGGPDTFDVWGQGTMVTVSS

SEQ ID NO: 24125 - protein, 97 aa, Homo sapiens
ASGYTFIDYGISWVRQAPGQGLEWMGWISAQNGDTHYAQRLQGRVTMTRDTTTTTVYMEMRSLTSDDTAIYYCARDKGGGPDTFDVWGPGTMVTVAS

SEQ ID NO: 24126 - protein, 95 aa, Homo sapiens
VASGLTLSSSPMHWVRQAPGKGLMWVSRIGLRGSDTTYADSVKGRFTISRDNAKNTVWLQMNSLRVEDTAVYYCAGDRGSVGGPWGQGTLVIVSS

SEQ ID NO: 24127 - protein, 94 aa, Homo sapiens
AASGFTFSRSPMHWVRQAPGKGLVWVSRIDGNGLTTYAESVKGRFTFSRDDAKNTVYLQMNSLTAEDTAVYFCAGDRGSVGGPWGQGTLVTVSS

SEQ ID NO: 24128 - protein, 97 aa, Homo sapiens
AGSGFTFNGNSMNWVRQAPGKGLEWVASISTTSRDIFYADSVKGRFTISRDNAKNSLYLQMNSLRAEDTAAYYCAKSLTSDRDWFDPWGQGTLVTVS

SEQ ID NO: 24129 - protein, 98 aa, Homo sapiens
AASGFSISSHSMNWVRQAPGQGLEWVSSISSTSRDIFYGDSVKGRFTISRDNANNLVFLQMYSLRGEDTGVYYCAKSLTSDRDWFDPWGQGTLVIVSS

SEQ ID NO: 24130 - protein, 96 aa, Homo sapiens
ASGYTITESAVHWVRQAPGQGLQWMGWINTDTEQARYAQGFRGRFVFSLDTSVNTAYLQIHNLEVEDTAVYYCTRDRGTYLRIDYWGQGTMVTVSS

SEQ ID NO: 24131 - protein, 96 aa, Homo sapiens
ASGYAFTTSAIHWVRQAPGQGLEWMGWVNTDTGNPTYVQGFTGRFVFSLDTSVSTAYLQISSLKAEDTAVYYCTRDRGTYLRIDYWGQGTLVSVSS

SEQ ID NO: 24132 - protein, 95 aa, Homo sapiens
ASGYSFTTSAIHWVRQAPGQGLEWMGWVNTDTGNPTYVQGFTGRFVFSLDTSVSTAYLQINSLKAEDTAVYYCTRDRGTYLRIDYWGQGTLSPSP

SEQ ID NO: 24133 - protein, 96 aa, Homo sapiens
ASGYTITTSAIHWVRQAPGQGLEWMGWINTDTGNPTYVQGFTGRFVFSLDTSVNTAYLQISSLKAEDTAVYYCTRDRGTYLRIDYWGQGTLVSVSS

SEQ ID NO: 24134 - protein, 96 aa, Homo sapiens
AASGFTFSSYAMSWVRQAPGKGLEWVSVIYRGGSSTYYADSVKGRFTISRDTSKNTLYLQMNSLRAEDTAVYYCAKDRSGWQYDYWGQGTLVTVSS

SEQ ID NO: 24135 - protein, 95 aa, Homo sapiens
AASGFTFSTYAMSWVRQAPGKGLEWVSIISGGGTVTYYADSVKGRFTISRDNSKNTLYLQMNSLRAEDTAVYYCAKDRSGWQYDYWGQGTLVTVS

SEQ ID NO: 24136 - protein, 98 aa, Homo sapiens
TVSGGSISSYYWSWIRQPPGKGLEWIGYIYYSGSTNYNPSLKSRATISVDTSKNQFSLKLSSVTAADTAVYYCAREGDGYNLYYFDYWGQGTQVTVSS

SEQ ID NO: 24137 - protein, 98 aa, Homo sapiens
TVSGGSISTYYWTWIRQPPGKGLEWIGYIYYTGTTNYNPSLRSRVTISADTSKNQFSLKLNSVTPADTAVYYCAREGDGYNLYYFDYWGQGTLVTVSS

SEQ ID NO: 24138 - protein, 98 aa, Homo sapiens
TVSGGSISSFYWSWIRQPPGKGLEWIGYIYYTGSTDFNPSLKSRATISLDTSKNQFSLRLSSVTAADTAVYYCAREGDGYNLYYFDYWGQGTLVTVSS

SEQ ID NO: 24139 - protein, 98 aa, Homo sapiens
TVSGGSISTYYWSWIRQFPGKGLEWIGYIYYTGTSNYNPTLRSRVTISSDTSKKQFFLRLTSVTAADTAVYYCAREGDGYNLYYFDYWGQGTLVTVSS

SEQ ID NO: 24140 - protein, 92 aa, Homo sapiens
TVSGGSISSGSYCWHWIRQPAGKGLEWIGRVCTSGSTDYNPSLKSRVTISIDTSENQFSLKLSSVTAADTAVYYCASDLGYWGQGTLVTVSS

SEQ ID NO: 24141 - protein, 92 aa, Homo sapiens
TVSGGSISSGSYYWSWIRQPAGKGLEWIGRIYTSGSTNYNPSLKSRVTISVDTSKNQFSLKLSSVTAADTAVYYCASDLGYWGQGTLVTVSS

SEQ ID NO: 24142 - protein, 103 aa, Homo sapiens
AASGFIFSSYWMHWVRQAPGKGLVWVSRIKSDGSSTSYADSVKGRFTISRDNAKNTLYLQMNSLRAEDTAVYYCARARYCSGGSCYYYGMDVWGQGTTVTVSS

SEQ ID NO: 24143 - protein, 103 aa, Homo sapiens
AASGFTFSSYWMHWVRQAPGKGLVWVSRINSDGSSTNYADSVKGRFTISRDNAKNTLYLQMNSLRADDTAVYYCARARYCSGGSCYYYGMDVWGQGTTVTVSS

SEQ ID NO: 24144 - protein, 95 aa, Homo sapiens
TSGFTFGSYAMTWVRQAPGKGLEWVSTISGRGDITYNADSVKGRFTISRDNSKDTVYLQMNSLRAEDTALYYCAKGGHYSVFDPWGQGILVTVSS

SEQ ID NO: 24145 - protein, 95 aa, Homo sapiens
ASGLTFSSYAMTWVRQTPGKGLEWVSTISGSGRDTYYGDSVKGRFTISRDNSKNTFYLQMNSLKAEDTAIYYCAKGGHYSVFDPWGQGTLVTVSS

SEQ ID NO: 24146 - protein, 95 aa, Homo sapiens
ASGLTFGSYAVTWVRQSPGKGLEWVSTISGNGRDTYYGDSVKGRFTISRDIFKNTCYLQMNSLKVEDTAIYYCAKGGHYSVFDPWGQGTPVTVSS

SEQ ID NO: 24147 - protein, 95 aa, Homo sapiens
TVSGGSISGYYWSWIRQSPGKGLEWTGNIYYSGSTNYNPSLKSRVTMSVDRSKNQFSLKLTSATAADTAVYHCARRSNSENYFDYWGQGALVTVS

SEQ ID NO: 24148 - protein, 95 aa, Homo sapiens; identical to SEQ ID NO: 24147

SEQ ID NO: 24149 - protein, 95 aa, Homo sapiens; identical to SEQ ID NO: 24147

SEQ ID NO: 24150 - protein, 96 aa, Homo sapiens
TVSGGSISSYYWSWMRQPPGKGLEWIGYINYSGSTNYNPSLKSRVTISVDTSKNQFSLKLSSVTAADTAVYYCARRSNSENYFDYWGRGTLVTAAS

SEQ ID NO: 24151 - protein, 102 aa, Homo sapiens
TVSGGSINSFYYWGWIRQPPDKGLEWIGSIYYSGSTYYNPSLKSRVTISVDTSKNQFSLKLRSVTAADTAVYYCARRDCSSTSCSTNWFDPWGQGTLVIVSS

SEQ ID NO: 24152 - protein, 102 aa, Homo sapiens
TVSGGSISSSYYWGWIRQSPGKGLEWIGSIYYTGTTYYNPSLKSRVTISGDTSKNQFSLKLRSVTAADTAVYYCARRDCSSTSCSTNWFDPWGQGTLVTVSS

SEQ ID NO: 24153 - protein, 98 aa, Homo sapiens
EASGFSSSNYVMAWVRQAPGKGLEWVSSLTQSGRTHYAGSVKGRFTVSRDNSQNSLSLQLTNLMVEDTATYHCAKGKSGGLLDWFDPWGPGTPVTVSS

SEQ ID NO: 24154 - protein, 98 aa, Homo sapiens
AASGFKISDYVVTWVRQGPGNRLEWVSSLTAIGNTHYADSVKGRFTVSRDNSDNMLYLEMNNLRADDTAVYFCAKGKSGGLLDWFDPWGQGTLVTVSS

SEQ ID NO: 24155 - protein, 93 aa, Homo sapiens
AASGFTFISYDMNWVRQAPGKGLEWVSYISSGGNTIYYTDSVKGRFTISRDNAKNSLYLQMNSLRAEDTAVYYCARGKAGGYWGQGTLVTVSS

SEQ ID NO: 24156 - protein, 93 aa, Homo sapiens
AASGFPFSIYELNWVRQAPGKGLEWVSYISSSGSARYYADSVKGRFTISRDNAKNSLYLQMNSLRAEDTAVYYCARGKAGGYWGQGTLVTVSS

SEQ ID NO: 24157 - protein, 95 aa, Homo sapiens
TVSGESIRSDYWSWIRQSPGKGLEWIGYIYYSGSTEYNPSLNRRVTISIDTSKKNQFLLDLTSVTAADTAVYFCARWRTGWFDPWGEGILVTVSS

SEQ ID NO: 24158 - protein, 94 aa, Homo sapiens
TVSGDPIASDYWSWIRQSPGKGLEWIGYIYYSGSTDYNASLRSRVTISVDRSKKQFSLKLNSVTAADTAVYYCARWRTGWFDPWGQGTRVTVSS

SEQ ID NO: 24159 - protein, 105 aa, Homo sapiens
AASGFIFSDHYMDWVRQAPGKGLEWVGRIKNKADRYTTQYAASVKGRFTISRDDSKNSLSLQMNSLKTEDTAVYYCVRGGIGYCSSTTCYDLDYWGQGTLVTVSS

SEQ ID NO: 24160 - protein, 105 aa, Homo sapiens
AASGFTFSDHYMDWVRQAPGKGLEWVGRCRNKAKSYTTDYAASVKGRFIVSRDDSKNSLYLQMNSLKTEDTAVYFCVRGGIGYCSSTTCYDLDYWGRGTLVTVSS

SEQ ID NO: 24161 - protein, 95 aa, Homo sapiens
AASGFTFSTYSMNWVRQAPGKGLEWISYIGSSSSTISYADSVKGRFTISRDNAKNSLDLQMNSLRDEDTAVYYCARDSAWAFDSWGQGTLVTVSS

SEQ ID NO: 24162 - protein, 95 aa, Homo sapiens
AASGFTFKTYPMNWVRQAPGKGLEWISNIRTSTEGGVTYAESVKGRFTVSRDDAQNLMFLQMSSLRAEDTARYYCARDSAWAFDSWGQGALVTVS

SEQ ID NO: 24163 - protein, 98 aa, Homo sapiens
TVSGGSISSYYWSWIRQPPGKGLEWIGYIYYSGSTNYNPSLKSRVTISVDTSKNQFSLKLSSVTAADTAVYYCARAQRGYSYGPFDYWGQGILVTVSS

SEQ ID NO: 24164 - protein, 98 aa, Homo sapiens
TVSGGSISSYYWSWIRQPPGKELEWIGYINYSGSTNYNPSLKSRVTISVDTSKNQFSLKLSSVTAADTAVYYCARAQRGYSYGPFDYWGQGTLVTVSS

SEQ ID NO: 24165 - protein, 92 aa, Homo sapiens
AASGFTFSSYGMSWVRQAPGKGLEWVSGISGSGGSTYYADSVKGRFTISRDNSKNTLYLQMNSLRAEDTAVYYCGGAAIGYWGQGTLVTVSS

SEQ ID NO: 24166 - protein, 92 aa, Homo sapiens
AASGFTFRSYAMSWVRQTPGKGLEWVSGIRVSDGNTYYADSVKGRFTISRDNSKNTLYMQMNSLRAEDTAVYYCGGAAIGYWGQGTLVTVSS

SEQ ID NO: 24167 - protein, 97 aa, Homo sapiens
AASGFTFRTYGMHWVRQAPGKGLEWVTVIWSDGNNKFYAESVKGRFTVSRDNSKNTLDLQMNSLRAEDSAVYYCVKEVGPFSGFDYWGQGTLVTVSS

SEQ ID NO: 24168 - protein, 97 aa, Homo sapiens
AASGFTFSRYGMHWVRQAPGKGLEWVAVIWSNGINQYYADSVRGRFTFSRDNSRNTLDLQMNSLRAEDTAVYFCVKEVGPFSGFDYWGQGALVTVSS

SEQ ID NO: 24169 - protein, 97 aa, Homo sapiens
EASGFTFIGYWMTWVRQAPGKGLEWVANIKEDGSEKWYVDSVKGRFTISRDNAKNSIYLQMNSLRVEDTAVYYCARYANGYYGMDVWGQGTTVTVSS

SEQ ID NO: 24170 - protein, 96 aa, Homo sapiens
ASGFTFSHFWMTWVRQAPGKGLEWVANIKEDGSQGYYVDSVKGRFTVSRDNAKNSQYLQMNSLRVDDTAVYYCARYANGYYGMDVWGQGTTVTVSS

SEQ ID NO: 24171 - protein, 99 aa, Homo sapiens
AASGFTFSDYYMGWFRQAPGKGLEWISYISNSGDTISYSDSVKGRFTLSRDNARNSLFLQMNSLRAEDTAVYYCARVGVIVAAGTYDYWGQGTLVTVSS

SEQ ID NO: 24172 - protein, 99 aa, Homo sapiens
AASGFTFSDYYMSWIRQAPRKGLEWVSYISSSGETIYYSDSVKGRFIISRDNAKNSLYLQMNSLRAEDTAVYYCARVGVIVAAGTYDYWGQGTLVTVSS

SEQ ID NO: 24173 - protein, 93 aa, Homo sapiens
AASGFNFSDAWMVWVRQAPGKGLEWVGRIKSKTDGGAIDYAVPVKGRFTISRDDSKNMVHLEMNSLKTEDTALYYCSWVGAAWGQGTLVTVSS

SEQ ID NO: 24174 - protein, 92 aa, Homo sapiens
ASGFTFSDAWMYWVRQAPGKGLEWVGHIKSKTDGGTIDYAGPVKGRFIVSRDDSKNTLFLQMNGLKIEDTAKYYCSWVGAAWGQGSLVTVSS

SEQ ID NO: 24175 - protein, 94 aa, Homo sapiens
AASGFSLSSYWMHWVRQVPGKGLVWVSRINGDGSSTTYADSVKGRFTISRDNAKNTLYLQMNSLRVEDTAVYYCARALGYSAYWGQGTLVTVSS

SEQ ID NO: 24176 - protein, 94 aa, Homo sapiens
AASGFTFSTYWMHWVRQAPGKGLVWVSGINGDGSITTYADSVKGRFTISRDNAKNTLDLQMNSLRAEDTALYYCARALGYSAYWGQGTLVTVSS

SEQ ID NO: 24177 - protein, 92 aa, Homo sapiens
AASGFTFSSYWMTWARQAPGKGLECVANIKQGGSDTSYVDSVKGRFTISRDNAKNSVYLQMNSLRAEDTAVYYCAIGSGSHWGQGTLVTVSS

SEQ ID NO: 24178 - protein, 92 aa, Homo sapiens
AASGFTFSNSWMSWVRQAPGKGLEWVAIINQDGSEKYYVDSVKGRFTISRDNAKNSLYLQMNSLRPEDTALYYCAIGSGSHWGRGTLVTVSS

SEQ ID NO: 24179 - protein, 92 aa, Homo sapiens
AASGFTFSNSWMSWVRQAPGKGLEWVAIINQDGSEKYYVDSVKGRFTISRDNAKNSLYLQMNSLRPEDTALYYCAIGSGSHWGQGTLVTVSS

SEQ ID NO: 24180 - protein, 92 aa, Homo sapiens; identical to SEQ ID NO: 24179

SEQ ID NO: 24181 - protein, 98 aa, Homo sapiens
AASGFTFSSYAMDWVRQAPGKGLEWVSYISSSGSTIYYADSVKGRFTISRDNAKNSLYLQMNSLRAEDTAVYYCARVAWIQLWFFDYWGQGTLATVSS

SEQ ID NO: 24182 - protein, 98 aa, Homo sapiens
AASGFSFSSYSMSWVRQAPGKGLEWVSHISSSSDSIYYADSVKGRFTISRDNAKNSLYLQMNSLRGEDTAVYYCARVAWIQLWFFDYWGQGTLVTVSS

SEQ ID NO: 24183 - protein, 99 aa, Homo sapiens
AASGFTFSSYGMHWVRQAPGKGLEWVAVIWYDGSNKYYADSVKGRFTISRDNSKDTLYLQMNSLRAEDTAVYYCTRGGTGYSSSWYLYWGQGALVTVSS

SEQ ID NO: 24184 - protein, 99 aa, Homo sapiens
AASGFTFSSYGMHWVRQGPGKGLEWVAVIWYDGSNKYYADSVKGRFTISRDNSKNTLYLQMNSLRAEDTAVYYCTRGGTGYSSSWYLYWGQGTLVTVSS

SEQ ID NO: 24185 - protein, 99 aa, Homo sapiens
AASGFTFSNYGMHWVRQGPGKGLEWVAVIWYDGSNKYYADSVKGRFTISRDNSKNTLYLQMNSLRAEDTAVYYCTRGGTGYSSSWYLYWGQGILVTVSS

SEQ ID NO: 24186 - protein, 94 aa, Homo sapiens
AASGFTFTTYTINWVRQAPGKGLEWVSAISGSGDTTYYADSVKGRFTISRDNSRNTVYLQMNSLRAEDTAEYYCARSNWGFDYWGQGTLVTVSS

SEQ ID NO: 24187 - protein, 94 aa, Homo sapiens
AASGFRFSSYTMSWVRQAPRKGLEWVSSISDNGGSTYYLDSVKGRFTISRDNSKNTLYLQMNSLRAEDTAIYYCARSNWGFDYWGQGTLVTVSS

SEQ ID NO: 24188 - protein, 94 aa, Homo sapiens
AVSGLRFSSYTMSWVRQAPRKGLEWVSSISDNGIGTYYLDSVKGRFTISRDNSKSILYLQMSSLRAEDTAIYYCARSNWGFDYWGQGTLVTVSS

SEQ ID NO: 24189 - protein, 94 aa, Homo sapiens
AASGFTFHIYSMYWVRQPPGKGLVWVSRISPDGSSTNYADSVEGRFTVSRDNARNTLYLQMNSLRAEDTAVYYCVRATWYFDFWGRGTLVTVSS

SEQ ID NO: 24190 - protein, 94 aa, Homo sapiens
AASGFSFSDYSMYWVRQAPGKGLVWVSRINGDGTDTTYADSVKGRFTISRDNAKNTLYLQMNSLRADDTAVFHCVRATWYFDFWGRGTLVTVSS

SEQ ID NO: 24191 - protein, 93 aa, Homo sapiens
AASGFTFSSYAMSWVRQAPGKGLEWVSAISGSGSSTYYADSVKGRFTISRDNSKNTLYLQMNSLRAEDTAVYNCARGERTDYWGQGTLVTVSS

SEQ ID NO: 24192 - protein, 93 aa, Homo sapiens
EVSGFTFSSFTMTWVRQAPGKGLEWVSTVSASGISTYYADSVKGRFTSSRDNSRNTLFLQMDSLRAEDTAVYYCARGERTDYWGQGTLVTVSS

SEQ ID NO: 24193 - protein, 102 aa, Homo sapiens
AASGFTFSTYAMTWVRQAPGKGLEWVSSISASTFYTIYADSVKGRFSISRDNSKNTVHLEMNSLRAEDTAVYYCAKRGADGTALGHWYFDLWGRGTLVTVSS

SEQ ID NO: 24194 - protein, 102 aa, Homo sapiens
AASGFTFSTYAMSWVRQTPGKGLEWVSSISGNAANTYYADSVKDRFTISRDNSKNTVHLQMNSLRAEDTAVYFCAKRGADGTALGHWYFDLWGRGTLVTVSS

SEQ ID NO: 24195 - protein, 94 aa, Homo sapiens
AASGFTFTDYWMSWVRQAPGKGLEWVANIKQDGSEKYYVDSVKGRFTISRDNAKRSLYLQMNSLRAEDTAVYYCASHSSGYYVWGQGTLVTVSS

SEQ ID NO: 24196 - protein, 93 aa, Homo sapiens
ASGINFSFWWMSWVRQAPGKGLEWVANIKPDGSEKYYVDSVNGRFTISRDNAKTSLYLQMNSLRPEDTALYYCASHSSGYYVWGRGTLVTVSS

SEQ ID NO: 24197 - protein, 93 aa, Homo sapiens; identical to SEQ ID NO: 24196

SEQ ID NO: 24198 - protein, 96 aa, Homo sapiens
AASGFTFTSYAIHWVRQAPGKGLEWVAVVSSDGSNKSYLESVKGRFTISRDNSKNTLYLQLNSLRAEDSAVYYCARLPPGTGFDYWGQGTLVTVSS

SEQ ID NO: 24199 - protein, 96 aa, Homo sapiens
AASGYTFTSYAIHWVRQAPGKGLEWVAVVSSDGNNKFYADSVKGRFAISRDNSKNTQYLQMNSLRAEDTAVYYCARLPPGTGFDYWGQGALVTVSS

SEQ ID NO: 24200 - protein, 97 aa, Homo sapiens
ISGDTVSNKYVSWNWIRQSPSRGLEWLGRTHYTSKWDFDYAVSVKSRIIFNADTSKNQFSLQLNSVTPEDTAVYYCARSKNYAFDYWGQGILVTVSS

SEQ ID NO: 24201 - protein, 97 aa, Homo sapiens
ISGDSVSSNSVVWNWIRQSPSRGLEWLGRTYYRSKWYNDYAVSVKSRITFNPDTSKNQFSLQLNSVTPEDTAVYYCARSKNYAFDYWGQGTLVTVSS

SEQ ID NO: 24202 - protein, 98 aa, Homo sapiens
AASGFTFSDYWMNWVRQAPGKGLEWVANIKQDGSEKYYVDSVKGRFTISRDNAENSLYLQMNSLTVEDTAVYYCARDGTAPGIYFDRWGQGTLVTVSS

SEQ ID NO: 24203 - protein, 98 aa, Homo sapiens
AASGFTFSSHWMSWVRQAPGKGLEWVANINQDGSEKHYVDSVKGRFTISRDNAKNSLFLQMNSLRVEDTAVYYCARDGTAPGIYFDRWGQGTLVTVSS

SEQ ID NO: 24204 - protein, 99 aa, Homo sapiens
TVSGASISSNSYYWAWIRQPPGKGLEWIGSIYYSVSTHYNPSLKSRVTISVDTSKNQFSLKLSSVTAADTAVYFCASPFGVVSNWFDPWGQGTLVTVSS

SEQ ID NO: 24205 - protein, 99 aa, Homo sapiens
TVSGGSISIGNYYWGWIRRPPGKGLEWIGSFHYSGRTYYNPSLKSRVTISVDTSKNQFSLNVNSVTAADTAVYYCASPFGVVSNWFDPWGQGTLVTVSS

SEQ ID NO: 24206 - protein, 96 aa, Homo sapiens
TGSGFTFGDHAVTWFRQAPGKELEWVGLIRSKPYGGTPEHAASLKGRFTISRDDSRGIAFLQMNSLKIEDTAVFYCARGAGAVDYWGQGTLVTVSS

SEQ ID NO: 24207 - protein, 96 aa, Homo sapiens
TASGFTFGDYTINWVRQAPGQGLEWVGFIRVKASGGTTEYTASVKGRFTISRDDSKSIAYLQMNSLKIEDTAVYYCARGAGAVDYWGQGTLVTVSS

SEQ ID NO: 24208 - protein, 96 aa, Homo sapiens
AASGFTFSSYWMSWVRQSPGKGLEWVANINQRGSETYYVDSVKGRFTISRDGATNSLFLQMNSLRAEDTGVYYCARDVYSSSSAYWGQGTLVTVSS

SEQ ID NO: 24209 - protein, 96 aa, Homo sapiens
EASGFTFSSYWMSWVRQAPGKGLEWVANIQKDGSEQYYVDSVKGRFTISRDNAKNSLYLQMNSLRAEDTAVYYCARDVYSSSSAYWGQGTLVTVSS

SEQ ID NO: 24210 - protein, 96 aa, Homo sapiens
AASGFSFSTYWMSWVRQAPGKGLEWVANINKDASEKYYADSVKGRFTISRDNAGNSLFLQMNSLRAEDTAVYYCARDVYSSSSAYWGQGTLVTVSS

SEQ ID NO: 24211 - protein, 94 aa, Homo sapiens
KGSGYSFTGYWIGWVRQMPGKGLEWMGIIYPADSDTRYSPSFQGQVTMSADKSISTAYLQWSSLKASDTAMYYCARGGRGFDVWGQGTMVTVSS

SEQ ID NO: 24212 - protein, 93 aa, Homo sapiens
GSGYSFSGSWIAWVRQLPGKGLEWVGIIYPGDSDTRYSPSFRGQVTISADTSIGTAYLQWDSLKASDTAMYFCARGGRGFDVWGQGTGVTVSS

SEQ ID NO: 24213 - protein, 94 aa, Homo sapiens
AASGLTFSSFWMSWVRQAPGKGLEWVANIKQDGSEKHYVDSVKGRFTISRDNAKSSLYLQMNSLRGEDTAVYYCARGYGWFDPWGQGTLVTVSS

SEQ ID NO: 24214 - protein, 94 aa, Homo sapiens
AASGFSFSYNWMTWVRQAPGKGLEWVANIKKDGSEKYYVDSVKGRFTISRDNAKNSLYLQMNSLRAEDTAVYYCARGYGWFDPWGQGTLVTVSS

SEQ ID NO: 24215 - protein, 96 aa, Homo sapiens
AATGFSFAGFGMTWVRQAPGKGLEWVSVIYPGGSYTNYVDSVKGRFTTSRDDSKNTVYLQMNSLRAEDTAIYYCAKDTTGWSRDYWGRGVLVTVSS

SEQ ID NO: 24216 - protein, 96 aa, Homo sapiens
AASGFTFNNYGMTWVRQAPGKGLEWVSTINHNGGRTYYADSVKDRFTISRDDSKNTVYLQMNSLRVEDTAVYYCAKDTTGWSRDYWGLGALVTVSS

SEQ ID NO: 24217 - protein, 93 aa, Homo sapiens
AASGLMLSDYWMTWVRQAPGKGLEWVATIKPDGTETYYAASVKGRFTISRDNARNSLYLQMSRLRAEDTALYFCARRGRVDYCGQGTLVTVSS

SEQ ID NO: 24218 - protein, 93 aa, Homo sapiens
AASGFTFSGYWMSWVRQAPGKGLEWVALISHDGSDKFYVNSVKGRFSVSRDNAHNALSLQMDSLRAEDTALYYCARRGRVDYWGQGTLVTVSS

SEQ ID NO: 24219 - protein, 95 aa, Homo sapiens
AASGFTVSSNYMSWVRQAPGKGLEWVSLIYSGGSTYYADSVKGRFTISRDNSKNTLYLQMNSLRAEDTAVYYCARVGLWFGVDYWGQGTLVTVSS

SEQ ID NO: 24220 - protein, 95 aa, Homo sapiens
AASGFTISTKYMSWVRQAPGKGLEWVSVIYSGGNTYYANSVKGRFTISRDNSKNTLYLQMNSLRVEDTAVYYCARVGLWFGVDYWGQGSLVTVSS

SEQ ID NO: 24221 - protein, 92 aa, Homo sapiens
ASGYTITGNYFHWVRQAPGQGLEWMGWINPNTGRTSYAQRFQGRVTMTRDTSINTVYMELSSLRYDDTAVYYCARNNSGYTWGQGTQVTVSS

SEQ ID NO: 24222 - protein, 92 aa, Homo sapiens
ASGYTFTDNYLHWVRQAPGQGLEWMGWINPNTGVTKYAQKFQGRVTVTRDTSISTAYMELSGLTSDDTAVYYCARNNSGYTWGQGTLVTVSS

SEQ ID NO: 24223 - protein, 91 aa, Homo sapiens
AASGFPFSNSWMTWVRQAPGKGLEWVANINEDGTEKSYLDSVKGRFTISRDNAKNSLYLQLNSLRVDDAAVYYCARFGIIGGRGTLVTVSS

SEQ ID NO: 24224 - protein, 91 aa, Homo sapiens
AASGFTFSQTWMNWLRQAPGKGLEWVASINEDASEKYYVDSVKGRFTISRDNAKNSMYLQMNSLSAEDTAVYFCARFGIICGQGTLVTVSS

SEQ ID NO: 24225 - protein, 95 aa, Homo sapiens
ASGYTFIGYFMHWMRQAPGQGPEWMGWINPKNGDTKYEQKFQGRVTMTRDTSISTAHMELSSLRSDDTALYFCTRGPRGGFFDYWGQGTLVTVSS

SEQ ID NO: 24226 - protein, 95 aa, Homo sapiens; identical to SEQ ID NO: 24225

SEQ ID NO: 24227 - protein, 95 aa, Homo sapiens
ASGYTFTNYYIHWMRQAPGQGLEWLGWINPNNGDTKLGQKFQGRVTMTRDTSISTAHMELSSLRYDDTAVYYCTRGPRGGFFDYWGQGTLVTVFS

SEQ ID NO: 24228 - protein, 95 aa, Homo sapiens; identical to SEQ ID NO: 24225

SEQ ID NO: 24229 - protein, 98 aa, Homo sapiens
TVSGGSISSDYWSWIRQPPGKGLEWIGYIYYSGSTSSNPSLKSRVTISVDTSKNHFSLKLTSVTAADTAVYYCARALRGYTYGPFDYWGQGTLVTVSS

SEQ ID NO: 24230 - protein, 98 aa, Homo sapiens
TVSGGSISSDYWSWIRQPPGKGLEWIGYIFYSGSTSSNPSLKSRVTISVDTSKNHFSLKLTSVTAADTAVYYCARALRGYTYGPFDYWGQGNLVTVSS

SEQ ID NO: 24231 - protein, 98 aa, Homo sapiens; identical to SEQ ID NO: 24229

SEQ ID NO: 24232 - protein, 98 aa, Homo sapiens
TVSGGSIRSDYWSWIRQPPGKGLEWIGYIYYSGSTSSNPSLKSRVTISVDTSKNHFSLKLTSVTAADTAVYYCARALRGYTYGPFDYWGQGTLVTVSS

SEQ ID NO: 24233 - protein, 98 aa, Homo sapiens
TVSGGSISSDYWSWIRQPPGKGLEWIGYIFYSGSTSSNPSLKSRVTISVDTSKNHFSLKLTSVTAADTAVYYCARALRGYTYGPFDYWGQGTLVTVSS

SEQ ID NO: 24234 - protein, 98 aa, Homo sapiens
TVSGGSISYYYLSWIRQPPGKGLEWIGYIFYSGGTSFNPSLTSRATISLDTSKNHFSLKLSSVTAADTAVYYCARALRGYTYGPFDYWGQGTLVTVSS

SEQ ID NO: 24235 - protein, 98 aa, Homo sapiens; identical to SEQ ID NO: 24234

SEQ ID NO: 24236 - protein, 98 aa, Homo sapiens; identical to SEQ ID NO: 24233

SEQ ID NO: 24237 - protein, 98 aa, Homo sapiens; identical to SEQ ID NO: 24229

SEQ ID NO: 24238 - protein, 96 aa, Homo sapiens
AASGFIFSDHYMDWVRQAPGKGLEWVGRSGNKANSYTTEYAASVKGRFTISRDGSKNSLYLHMNSLQTEDTAVYYCARGATPLDYWGQGTLVTVSS

SEQ ID NO: 24239 - protein, 95 aa, Homo sapiens
VVSGFTFRDHYMDWVRQAPGKGLEWVGRTANKANSYTTEYAASVKGRFTISRDDSKNSLYLQMNSLKTEDTAVYYCARGATPLDYWGQGTLVTVS

SEQ ID NO: 24240 - protein, 96 aa, Homo sapiens
AASGFIFSDHYMDWVRQAPGKGLEWVGRTGNKANSYTTEYAASVKGRFTISRDGSKNSLYLHMDSLKTEDTAVYYCARGATPLDYWGQGTLVTVSS

SEQ ID NO: 24241 - protein, 96 aa, Homo sapiens
VASGFTFSDHYMDWVRQAPGKGLEWVGHSRNKANSYTTEYAASVKGRFTISRDDSKNSLYLQMNSLRTEDTAVYYCARGATPLDYWGRGTLVTVSS

SEQ ID NO: 24242 - protein, 93 aa, Homo sapiens
AASGFTLSTSWMNWVRQAPGKGLEWVANINQDGGEKHYVDSVKGRFTISRDNAKNSLYLQMNSLRAEDTAVYYCARSRGLDSWGQGALVTVSS

SEQ ID NO: 24243 - protein, 93 aa, Homo sapiens
AASGFMLSTSWMNWVRQAPGKGLEWVANINQDGGEKHYVDSVKGRFTISRDNAKNSLYLQMNSLRAEDTAVYYCARSRGLDSWGQGALVTVSS

SEQ ID NO: 24244 - protein, 93 aa, Homo sapiens
AASGFTFSSYLINWVRQAPGKGLEWVANIKQDGSEKYYVDSVKGRFTISRDNAKNSLYLQMNSLRVEDTAVYYCARSRGLDSWGQGTLVTVSS

SEQ ID NO: 24245 - protein, 97 aa, Homo sapiens
AASGFIFSQHWMCWVRQAPGKGLEWVANIKQDGSEKNYVDSVKGRFTISRDNAKNSLYLQMNSLRAEDTAVYYCAKDRTHRDGFDIWGQGTVVTVSS

SEQ ID NO: 24246 - protein, 97 aa, Homo sapiens; identical to SEQ ID NO: 24245

SEQ ID NO: 24247 - protein, 97 aa, Homo sapiens
AASGFSFSDHWMSWVRQAPGEGLEWVANIRQDGSEMYYVGSVKGRFTISRDNAKNSLYLQMNNLRAEDTAVYYCAKDRTHRDGFDIWGQGTMVTVSS

SEQ ID NO: 24248 - protein, 97 aa, Homo sapiens
AASGFSFSDHWMSWVRQAPGEGLEWVANIKQDGSEMYYVGSVKGRFTISRDNAKNSLYLHMNNLRAEDTAVYYCAKDRTHRDGFDIWGQGTMVTVSS

SEQ ID NO: 24249 - protein, 97 aa, Homo sapiens
AASGFIFSNHWMCWVRQAPGKGLEWVANIKQDGSEKNYVDSVKGRFSISRDNAKNSLYLQMNSLRAEDTAVYYCAKDRTHRDGFDIWGQGTVVTVSS

SEQ ID NO: 24250 - protein, 97 aa, Homo sapiens; identical to SEQ ID NO: 24245

SEQ ID NO: 24251 - protein, 97 aa, Homo sapiens
AASRFMFSDHWMSWVRQAPGKGLEWVANIKQDGSEKYYVDSVKGRFTISRDNTKNSLYLQMNSLRAEDTAVYYCAKDRTHRDGFDIWGQGTMVTVSS

SEQ ID NO: 24252 - protein, 96 aa, Homo sapiens
AASGFTFSGSAMTWVRQAPGKGLECVSLIRFNGNDKYYADSVKGRFTISRDNSRNTLSLEMNSLRAEDTAVYYCAKTGSGWFLDYWGLGTLVTVSS

SEQ ID NO: 24253 - protein, 96 aa, Homo sapiens
AASGFTFSSYAMTWVRQAPGKGLDWVSLIYSGGTSTYYADSMKGRFTISRDNSKNTLFLQMNSLRDEDTAVYYCAKTGSGWFLDYWGQGTLVTVSS

SEQ ID NO: 24254 - protein, 101 aa, Homo sapiens
AASGFTFDDYAMHWVRQVPGKGLEWVSGFSWNRGTIGYADSVKGRFTISRDNAKNSLYLQMNSLRAEDTALYYCAKDNLRYGSGSYLIDYWGQGTLVTVSS

SEQ ID NO: 24255 - protein, 101 aa, Homo sapiens
AASGFTFEDYAMHWVRQVPGKGLEWVSGFSWNRGTIGYADSVKGRFTISRDNAKNSLYLQMNSLRAEDTAFYYCAKDNLRYGSGSYLIDYWGQGTLVTVSS

SEQ ID NO: 24256 - protein, 101 aa, Homo sapiens
AASGFTFDDYAIHWVRQAPGKGLEWVSGISWRSTTIGYADSVKGRFTISRDNAKKSLYLQMNSLRAEDTALYYCAKDNLRYGSGSYLIDYWGQGTLVTVSS

SEQ ID NO: 24257 - protein, 101 aa, Homo sapiens; identical to SEQ ID NO: 24256

SEQ ID NO: 24258 - protein, 92 aa, Homo sapiens
AASGFNFRSYWMNWVRQAPGKGLEWVANINQNGSERYYVDSLKGRFTISRYNAKNSLYLQMNSLRVDDTAVYYCARGDSNYWGQGTLVTVSS

SEQ ID NO: 24259 - protein, 92 aa, Homo sapiens
AASGFTFSSSWMGWVRQAPGKGLEWVANIKRDGSQQYYVDSVKGRFTVSRDTAKSSLYLQMNSLRAEDTAVYYCARGDSNYWGQGTLVTVSS

SEQ ID NO: 24260 - protein, 96 aa, Homo sapiens
AASGFTFSGFWMHWVRQTPGKGLVWVSHITGDGNGIAYAGSVKGRFTISRDNAKNTLYLQMNSLRGDDTAVYYCARGGVVGAMDYWGQGNLVTVSS

SEQ ID NO: 24261 - protein, 96 aa, Homo sapiens
AGSGFTLSHYWMHWVRQAPGKGLVWVSRISNDGSTSSYADSVKGRFTISRDNVKNTVSLQMNSLRAEDTAVYYCARGGVVGAMDYWGQGTLVTVSS

SEQ ID NO: 24262 - protein, 97 aa, Homo sapiens
VSGASISSGGYYWSWIRHHPGRGLEWIGYIYYSGSTYYNPSLESRVSISVDTSNSQFSLRLASVSAADTAVYYCARYYDSGGYHDYWGQGTLVTVSS

SEQ ID NO: 24263 - protein, 97 aa, Homo sapiens
VSGASISSGGYYWSWIRHPPGKGLEWIGYIYYSGSTYYNPSLESRVSISVDTSKNQFSLKLSSATAADTAVYYCARYYDSGGYHDYWGQGTLVTVSS

SEQ ID NO: 24264 - protein, 97 aa, Homo sapiens; identical to SEQ ID NO: 24263

SEQ ID NO: 24265 - protein, 97 aa, Homo sapiens
VSGASISSGGYYWSWIRHHPGRGLEWMGYIYYSGSTYYNPSLESRVSISVDTSNSQFSLRLASVSAADTAVYYCARYYDSGGYHDYWGQGTLVTVSS

SEQ ID NO: 24266 - protein, 98 aa, Homo sapiens
TVSGASISSGGYYWSWIRHHPGRGLEWIGYIYYSGSTYYNPSLESRVSISVDTSKSQFSLRLASVSAADTAVYYCARYYDSGGYHDYWGLGTLVTVSS

SEQ ID NO: 24267 - protein, 97 aa, Homo sapiens
VSGASIGRGGYYWSWIRHHPGRGLEWIGYIYYSGSTYFNPSLESRVSISVDTSNGQFSLRLASVSAADTAVYYCARYYDSGGYHDYWGQGTLVTVSS

SEQ ID NO: 24268 - protein, 97 aa, Homo sapiens
VSGASIGRGGYYWSWIRHHPGRGLEWIGYIYYSGSTYYNPSLESRVSISVDTSNGQFSLRLASVSAADTAVYYCARYYDSGGYHDYWGQGTLVTVSS

SEQ ID NO: 24269 - protein, 98 aa, Homo sapiens
TVSGGSISSAGYYWSWIRQHPEKGLEWIGYIYYSGTTYYNPSLKSRLTISVDTSKNQFSLNLSSVTAADTALYYCARYYDSGGYHDYWGQGTLVTVSS

SEQ ID NO: 24270 - protein, 97 aa, Homo sapiens
VSGASIGSGGYYWSWIRHHPGRGLEWIGYIYYSGSTYYNPSLESRVSISVDTSNGQFSLRLASVSAADTAVYYCARYYDSGGYHDYWGQGTLVTVSS

SEQ ID NO: 24271 - protein, 97 aa, Homo sapiens
VSGASISSGGYYWSWIRHHPGRGLEWIGYIYYSGSTYYNPSLESRVSISVDTSNSHFSLRLASVSAADTAVYYCARYYDSGGYHDYWGQGTLVTVSS

SEQ ID NO: 24272 - protein, 97 aa, Homo sapiens; identical to SEQ ID NO: 24270

SEQ ID NO: 24273 - protein, 97 aa, Homo sapiens
VSGGSISSGGYYWSWIRHHPGRGLEWIGYIYYSGSTYYNPSLESRVSISVDTSKSQFSLRLASVSAADTAVYYCARYYDSGGYHDYWGQGTLVTVSS

SEQ ID NO: 24274 - protein, 96 aa, Homo sapiens
ISGDNVFNTRVAWNWIRQSPSRNLEWLGRTYYNSKWNHDYADSVKSRITINLDTSKNQLSLQLNSVTPGDTAVYFCARGQNHAFDIWGQGTMVTVS

SEQ ID NO: 24275 - protein, 94 aa, Homo sapiens
ISGDSVSDNSVAWNWIRQSPSRGLEWLGRIYRGSNDYALFVKSRLTINPDTSKNQFSLHLNSVTPEDTAVYYCARGQNHAFDIWGQGTMVTVSS

SEQ ID NO: 24276 - protein, 94 aa, Homo sapiens
ISGDSVSSNSVAWNWIRQSPSRGLEWLGRIYRGNKDYALNVKSRLTINPDTSKNQFSLHLNSVTPEDTAVYYCARGQNHAFDIWGQGTMVTVSS

SEQ ID NO: 24277 - protein, 94 aa, Homo sapiens
ISGDSVSSNSVAWNWIRQSPSRGLEWLGRIYRGSNDYALFVKSRLTINPDTSKNQFSLHLNSVTPEDTAVYYCARGQNHAFDIWGQGTMVTVSS

SEQ ID NO: 24278 - protein, 94 aa, Homo sapiens
ISGDSVSDNSVAWNWIRQSPSRGLEWLGRIYRGSNDYALFVKSRLTIKPDTSKNQFSLHLNSVTPEDTAVYYCARGQNHAFDIWGQGTMVTVSS

SEQ ID NO: 24279 - protein, 92 aa, Homo sapiens
ISGDSVSSNSVAWNWIRYSPSRGLEWLGRTYRRSYDYAVSVKSRITINADTSKNQLSLHLSSVTPEDTAVYYCARGQNHAFDIWGQGTVVTV

SEQ ID NO: 24280 - protein, 98 aa, Homo sapiens
SVSGDSISSGGNFWSWIRQHPGEGLEWIGYMYHGGSSHYNPTLRSRVIISTDASKNQFSLNLSSVTAADTAVYYCARDITGKYYFDYWGQGTLVTVSS

SEQ ID NO: 24281 - protein, 98 aa, Homo sapiens
TVSGDSLSSGGYFWSWIRQHPGKGLEWIGYTYYGGTTHYNPSLESRVSISVDASKNQFSLKLASVTAADTAMYYCARDITGKYYFDYWGQGTPAIVSS

SEQ ID NO: 24282 - protein, 98 aa, Homo sapiens
TVSGGSISSGGYFWSWIRQLPGKGLEWIGYTYHGGTTHYKPSLRSRVTISTDASKNQFSLKLNSVTAADTAVYFCARDITGKYYFDYWGQGTLVTVSS

SEQ ID NO: 24283 - protein, 94 aa, Homo sapiens
AASGFTFSTYWMHWVRQAPGKGLVWVSRIDTDGSATSYADSVKGRFTISRDNAKSTVYLQMNSLRAEDTAVYYCARGFNWFDSWGQGTLVTVSS

SEQ ID NO: 24284 - protein, 94 aa, Homo sapiens
AASGFTFSNYWMHWVRQAPGKGLVWVSRINSDGSSTTYADSVKGRFTISRDNAENTLYLQMNSLSAEDTAVYYCARGFNWFDSWGQGTLVTVSS

SEQ ID NO: 24285 - protein, 97 aa, Homo sapiens
TVFGGSISGYYWNWIRQPAGKGLEWLGRIYSSGSINNNPSLESRVTMSVDTSKNQFSLKLSSVTAADTAMYYCAREDSGSSYYFDYWGQGTLVTVSS

SEQ ID NO: 24286 - protein, 97 aa, Homo sapiens
TVFGGSISGYYWNWIRQPAGKGLEWLGRISSSGNINNNPSLESRVTMSVDTSKNQFSLKLSSVTAADTAMYYCAREDSGSSYYFDYWGQGTLVTVSS

SEQ ID NO: 24287 - protein, 97 aa, Homo sapiens
TVSGGSISSYYWNWIRQPAGKGLEWLGRIYSTGSTNDNPSLKSRVTMSVDTSQNQFSLKLSSVTAADTAVYFCAREDSGSSYYFDYWGQGTLVTVSS

SEQ ID NO: 24288 - protein, 97 aa, Homo sapiens; identical to SEQ ID NO: 24285

SEQ ID NO: 24289 - protein, 97 aa, Homo sapiens
TVSGGSISTYFWNWIRQPAGKGLEWIGRIYTGGNTDDNPSLKSRVTMSVDTSKNQISLKLSSVTAADTAVYFCAREDSGSSYYFDYWGQGTLVTVSS

SEQ ID NO: 24290 - protein, 96 aa, Homo sapiens
TVSGDSISSYYWSWIRQPAGKGLEWIGRIYSSGSTNYNPSLIRRVTMSIDTSKNQFSLKLSSVTAADTAVYYCAREDSGSSYYFDYWGQGTLVTVS

SEQ ID NO: 24291 - protein, 98 aa, Homo sapiens
AASGFTFNEYAMHWVRQAPGKGLEWVSSINWNSGSIGYADSVKGRFTISRDNAKNSLYLQMNSLRAEDTALYYCVKDLDSSGYYPDYWGQGTLVTVSS

SEQ ID NO: 24292 - protein, 97 aa, Homo sapiens
ASGFTFDEYALHWARQRPGKGLEWVSGISWNSGSIGYADSVKGRFTISRDNAKNSLYLQMNSLRAEDTAFYYCVKDLDSSGYYPDYWGQGTLVTVSS

SEQ ID NO: 24293 - protein, 100 aa, Homo sapiens
AASGFTFSNYAMTWVRKAPGKGLEWVSSISGSGDNTYYADSVKGRFTISRDNSKKTLYMQLNSLRAEDTAKYYCARDRVVRGVMGAFDYWGQGTLVTVSS

SEQ ID NO: 24294 - protein, 100 aa, Homo sapiens
AASGFTFSNYAMTWVRQAPGKGLEWVSSISGSGDNTYYADSVKGRFTISRDNSKKTLYMQLNSLRAEDTAKYYCARDRVVRGVMGAFDYWGQGTLVTVSS

SEQ ID NO: 24295 - protein, 100 aa, Homo sapiens
AASGFTFSTYAMNWVRQAPGKGLEWVSTISGSGDSTYYADSVKGRFTISRDKSKNTLYLQMNSLRAEDTAVYYCARDRVVRGVMGAFDYWGQGTLVTVSS

SEQ ID NO: 24296 - protein, 97 aa, Homo sapiens
AASGFSFNSYEMNWVRQAPGKGLEWVSYISSTAGTIYYADSVRGRFTISRDNAKNSLYLQMNSLRAEDTAVYYCARDSRTSGEFDPWGQGTLVTVSS

SEQ ID NO: 24297 - protein, 97 aa, Homo sapiens
AASGFTFSSYEMNWVRQAPGKGLEWVSYISSSGSTIYYADSVKGRFTISRDNARNSLYLQMNSLRDEDTAVYYCARDSRTSGEFDPWGQGTLVTVSS

SEQ ID NO: 24298 - protein, 97 aa, Homo sapiens
AASGFTFRTYEMNWVRQAPGKGLEWVSYISGSGDTIYYADSVKGRFTISRDNAKNSLYLQLNSLRDEDTAIYYCARDSRTSGEFDPWGQGTLVTVSS

SEQ ID NO: 24299 - protein, 93 aa, Homo sapiens
AASGFTFSSYWMTWVRQAPGKGLEWVANIKQDGSEKYYVDSVRGRFTISRDNAKNSLFLQMNSLRVEDMAVYYCARGRFGPYWGQGILVTVSS

SEQ ID NO: 24300 - protein, 93 aa, Homo sapiens
AASGFTFNSYWMTWVRQAPGKGLEWVANIKQDRSEKYYSDSVRGRFTISRDNAENSVYLQMNSLRAEDTAVYYCARGRFGPYWGQGILVTVSS

SEQ ID NO: 24301 - protein, 93 aa, Homo sapiens
AASEFTFSSYWMTWVRQAPGKGLEWVANIKQDGSEKYYVDSVKGRFTISRDNAKNSLYLQMNSLRGEDTAVYYCARGRFGPYWGQGTLVTVSS

SEQ ID NO: 24302 - protein, 93 aa, Homo sapiens
AASEFTFSSYWMTWVRQAPGKGLEWVANIKQDGSEKYYVDSVKGRFTISRDNAKNSLYLQMNSLRAEDTAVYYCARGRFGPYWGQGTLVTVSS

SEQ ID NO: 24303 - protein, 96 aa, Homo sapiens
TVSGGSINSYYWSWIRQPAGKGLEWIGRIYASGGTNYNPSLKSRVTMSVDTSKNQLSLKLSSVTAADTAVYYCARGPYTGHWFDPWGQGTLVTVSS

SEQ ID NO: 24304 - protein, 97 aa, Homo sapiens
TVSGDSFRTDCWSWIRQPAGKGLEWIGRVCSSGGSSNYNPSLKSRVTMSVDTSKNQFSLNLNSVTAADTAVYYCARGPYTGHWFDPWGQETLVTASS

SEQ ID NO: 24305 - protein, 96 aa, Homo sapiens
TVSGGSISGSCWSWIRQPAGKGLEWIGRVFTSGSTDYNPSLKSRVTMSIDTSKNQFSLKLSSVTAADKAVYYCARGPYTGHWFDPWGQGTLVTVSS

SEQ ID NO: 24306 - protein, 90 aa, Homo sapiens
ASGFTFSNYNMNWVRQAPGKGLEWVSYISTSSDTIYYADSVKGRFSISRDNAKNSLFLQMNSLRDEDTAVYYCARGLAYWGQGTLVTVSS

SEQ ID NO: 24307 - protein, 91 aa, Homo sapiens
EASGFTFSTYDMNWVRQAPGKGLEWVSYISSSSGAIYYADSVKGRFTISRENAKNSLYLQMNSLRAEDTALYYCARGLAYWGQGTLVTVSS

SEQ ID NO: 24308 - protein, 91 aa, Homo sapiens; identical to SEQ ID NO: 24307

SEQ ID NO: 24309 - protein, 94 aa, Homo sapiens
VASGFTFSDFWMSWVRQVPGKGLEWVANIKPDGNEKYYVDSVKGRFTISRDNAKNSLFLQMNNLRVEDTALYYCASHSSGYFCWGQGTLVTVSS

SEQ ID NO: 24310 - protein, 94 aa, Homo sapiens
AASGFTFSDFWMSWVRQVPGKGLEWVANIKPDGNEKYYVDSVKGRFTISRDNAKSSLFLQMNNLRVEDTAVYYCASHSSGYFCWGQGTLVTVSS

SEQ ID NO: 24311 - protein, 94 aa, Homo sapiens
VASGFSLSNHWMSWVRQAPGKGLEWVANIKQDGSEKYYVDSVRGRFSISRDNAKNSLYLQMNSLRAEDTAVYYCASHSSGYFCWGQGTLVTVSS

SEQ ID NO: 24312 - protein, 95 aa, Homo sapiens
AASGFRFNMYSMNWIRQAPGKGLEWISYMTSDTRTIHHADSVRGRFTISRDNDKSLVFLQMNSLRDEDTAVYYCARSVEGHFDLWGQGTQVTVSS

SEQ ID NO: 24313 - protein, 94 aa, Homo sapiens
ASGFTFSIYSMNWIRQAPGKGLEWIAYETSDTKTIKYVDSVRGRFTISRDNAKKLLYLQMNSLRPDDTAVYYCARSVEGHFDLWGQGTLVTVSS

SEQ ID NO: 24314 - protein, 96 aa, Homo sapiens
AASGFTFTTYAMSWVRQAPGKGLEWVSAISQSGYNTYYADSVKGRFTISRDNSENTLFLQMNSLRAEDTAVYYCARDRDRPYFDYWAQGTLVTVSS

SEQ ID NO: 24315 - protein, 96 aa, Homo sapiens
AASGFSFSNYAMSWVRQAPGKGLEWVSAIGSSDDNTYYADSVKGRFTISRDNSKNTLYLQMNSLRAEDTAVYYCARDRDRPYFDYWGQGTLVTVSS

SEQ ID NO: 24316 - protein, 93 aa, Homo sapiens
AVSGFIVNENYMSWLRQAPGKGLEWVSMIYSSGEIHYTDSVKGRFTISRHNSNNILYLQMNGLRVDDTAVYYCARWSGTFYDYWGRGNLVTVS

SEQ ID NO: 24317 - protein, 94 aa, Homo sapiens
AASGLTVSSNYMSWVRQPPGKGLEWVSIMYSDGTTYYADSVKGRFTISRDNSKNTLYFQVNSLRTEDTAVYYCARWSGTFYDYWGQGTLVTVSS

SEQ ID NO: 24318 - protein, 93 aa, Homo sapiens
AVSGFIVNENYMSWLRQAPGKGLEWVSMIYSSGEIHYTDSVKGRFTISRHNSNNILYLQMNSLRVDDTAVYYCARWSGTFYDYWGHGNLVTVS

SEQ ID NO: 24319 - protein, 99 aa, Homo sapiens
AASGFTFSRHWMHWVRQAPGKGLMWVSRINSEARRTNYADSVKGRFTISRDNAKNTLYLQMNSLRDDDTAVYYCARDPRDGRESPPDYWGQGTLVTVSS

SEQ ID NO: 24320 - protein, 99 aa, Homo sapiens
AASGFTFSNHWMHWVRQGPGKGLVWVSRINGEGSRTNYAVSVKGRFTISRDNAKNTLYLQMNSLRAEDTAVYYCARDPRDGRESPPDYWGQGILVTVSS

SEQ ID NO: 24321 - protein, 99 aa, Homo sapiens; identical to SEQ ID NO: 24319

SEQ ID NO: 24322 - protein, 90 aa, Homo sapiens
SGFMFTTDHMTWARQAPEKGLEWVSVFRASDSTTYYADSVKGRFTISRDNSKNTVYLQMNSLKVDDTAIYYCVKGRGDHWGQGSLVTVSS

SEQ ID NO: 24323 - protein, 91 aa, Homo sapiens
AASGFTFTNYVMSWVRQAPGKWLECVSVISDVDKTYYADSVKGRFTISRDSTKNTLYLQMNTLRAEDTALYYCVKGRGDHWGQGTLVTVSS

SEQ ID NO: 24324 - protein, 93 aa, Homo sapiens
TSGFTFSSFWMSWVRQAPGKGLEWVANVKQNGSERYYVDSVKGRFTISRDDATKSLYLQMSNLRAEDTAVYYCVRGSAHLRYWGQGTLVAVSS

SEQ ID NO: 24325 - protein, 94 aa, Homo sapiens
AASGFTLSSYWMSWVRQAPGKGLEWVANIKQNGSEKYYVDSVKGRFTISRDDAKNSLYLQMNSLRAEDTAVYYCVRGSAHLRYWGQGTLVTVSS

SEQ ID NO: 24326 - protein, 94 aa, Homo sapiens; identical to SEQ ID NO: 24325

SEQ ID NO: 24327 - protein, 94 aa, Homo sapiens
ATSGFTFSSFWMSWVRQVPGQGLQWVANIKQSGSEKYYVDSVKGRFTISRDDAKKSLYLQMNSLRAEDTAVYYCVRGSAHLRYWGQGTLVAVSS

SEQ ID NO: 24328 - protein, 93 aa, Homo sapiens
ASGYTFTGYHIHWVRQAQGLEWMGRINPNSGDTKYAQKFQGRVTMSRDTSITTTYMELNRLTSDDTAVYYCARGAGSNRFDPWGQGTLVTVSS

SEQ ID NO: 24329 - protein, 95 aa, Homo sapiens
APGDTFTDDYIHWVRQAPGQGLEWMGWISPKSGGTNYIQRFQGRVTLTRDTSITTVYMELKSLTSDDTAVYFCARGAGSNRFDPWGQGTLVIVSS

SEQ ID NO: 24330 - protein, 95 aa, Homo sapiens; identical to SEQ ID NO: 24329

SEQ ID NO: 24331 - protein, 93 aa, Homo sapiens
ASGYTFTGSYIHWVRQAQGLEWMGWISPTSGDTKYAQKFQGRVTMSRDTSITTIYLELNRLTSDDTAVYYCARGAGSNRFDPWGQGTPVTVSS

SEQ ID NO: 24332 - protein, 93 aa, Homo sapiens
AASGFTFISSWMNWVRQAPGKGLEWVANINQDGSETHYVDSVKGRFTISRDNAKNSVYLQMNSLRDEDTAVYFCARHRGLAYWGQGTLVTVSS

SEQ ID NO: 24333 - protein, 91 aa, Homo sapiens
AASGFTFSSDWMSWVRQAPGKGLEWVANIKQDGSEKYYVDSVKGRFTISRDNAENSLFLQMNSLRAEDTAVYYCARHRGLAYWGQGTLVTV

SEQ ID NO: 24334 - protein, 93 aa, Homo sapiens; identical to SEQ ID NO: 24332

SEQ ID NO: 24335 - protein, 99 aa, Homo sapiens
TVSGGSISSTNSYWGWIRQPPGKELEWIGTIYYTGGTYYDPSLKSRVTISVDASKNQFSLRLTSVTVADTAVYYCARRMTGPGGWFDSWGQGTLVTVSS

SEQ ID NO: 24336 - protein, 99 aa, Homo sapiens
TVSGGSISSTNSYWGWIRQPPGKELEWIGTIYYSGGTYYDPSLKSRVTISVDASKNQFSLRLTSVTVADTAVYYCARRMTGPGGWFDSWGQGTLVTVSS

SEQ ID NO: 24337 - protein, 99 aa, Homo sapiens
TVSGGSISSSNSYWGWIRQSPGKGLEWIGTVHYNGNTYYHPSLQSRVTIPLDTSKNQFSLRLTSVSAADTGVYYCARRMTGPGGWFDSWGQGTLVTVSS

SEQ ID NO: 24338 - protein, 99 aa, Homo sapiens
AASGFTFDDYAMHWVRQAPGKGLEWVSGISWNRNTIGYADSVKGRFTISRDNAKNSLYLQMNSLRTEDTGLYYCAKGLFGQLSNWIDPWGQGTLVTVSS

SEQ ID NO: 24339 - protein, 99 aa, Homo sapiens
AASGFTFDDYAMHWVRQVPGKGLEWVSGISYNSVTIGYAESVKGRFTISRDNAKNSLYLQMNSLRAEDTALYYCAKGLFGQLSNWIDPWGQGTLVTVSS

SEQ ID NO: 24340 - protein, 97 aa, Homo sapiens
AVYDGSFSPYYWSWLRQPPGKGLEWIGEINHRGSTNYNPSLKSRVTISADTSKRQFSLKLSSMTAADTAVYYCAREVKSGDDAFDVWGQGTMVTVSS

SEQ ID NO: 24341 - protein, 97 aa, Homo sapiens
AVYGGSLNNFYWTWIRQPPGQGLEWIGEINHRGSTNCNPSLKSRVTISVDGSKNQLSLKLTSVTAADTAVYYCAREVKSGDDAFDVWGQGTMVTVSS

SEQ ID NO: 24342 - protein, 94 aa, Homo sapiens
AASGSIFRSYWMTWVRQAPGKGLQWVANIDQDGNEKYYMDSVKGRFTISRDNAENSLYLQMNSLRVEDTAVYFCASPPAYGGYWGQGTLVTVSS

SEQ ID NO: 24343 - protein, 94 aa, Homo sapiens
AASGFTFSSSWMTWVRQAPGKGLEWVANINQGGTEKKYVDSVKGRFTVSRDNAKNSLYLQMNSLRGEDTAVYYCASPPAYGGYWGQGTLVTVSS

SEQ ID NO: 24344 - protein, 93 aa, Homo sapiens
ASGFTFGNCWMSWVRQAPGKGLEWVANIKQDGSERIYVDSVKGRFTISRDNARNSLFLQMNTLRAEDTAVYYCASPPAYGGYWGQGTLVTVSS

SEQ ID NO: 24345 - protein, 94 aa, Homo sapiens
AASGIIFRSYWMSWVRQAPGKGLEWVANINQDGNEKYYMDSVKGRFTISRDNAENSLYLQMNSLRVEDTAVYYCASPPAYGGYWGQGTLVTVSS

SEQ ID NO: 24346 - protein, 94 aa, Homo sapiens
AASGFTFSTNWMTWVRQAPGKGLEWVANIRQDGGEKYYVDSVKGRFTISRDNAKNSLYLQMNSLRAEDTAVYYCASPPAYGGYWGQGTVVTVSS

SEQ ID NO: 24347 - protein, 94 aa, Homo sapiens
VASGFTFSSYWMTWVRQAPGKGLEWVANIKEDGGEKYYVDSVKGRFTISRDNAKKSLYLQMNSLRAEDTAVYYCASPPAYGGYWGQGTLVTVSS

SEQ ID NO: 24348 - protein, 94 aa, Homo sapiens
VGSGFTFSSYWMTWVRQAPGKGLEWVANIKEDGGEKYYVDSVKGRFTISRDNAKKSLYLQMSSLRAEDTAVYYCASPPAYGGYWGQGTLVTVSS

SEQ ID NO: 24349 - protein, 93 aa, Homo sapiens
ASGFTFNNYWMTWVRQAPGKGLEWVANIKQDGGDKYYVDSVKGRFTVSRDNAKKSLYLQMNSLRAEDTAVYYCASPPAYGGYWGQGTLVTVSS

SEQ ID NO: 24350 - protein, 95 aa, Homo sapiens
AASGFTFSNYWMQWVRQAPGKGLVSVSHINSDGSSTTYADSVKGRFTISRDNAKNTLYLQMNSLRAEDTAVYYCARDYYGSYDYWGQGTLVTVSS

SEQ ID NO: 24351 - protein, 95 aa, Homo sapiens
AASGFTFNTYSMHWVRQAPGRGLVWVSDINNDGNIITYADSVKGRFTVSRDNAKNTLYLQMNSLRAEDTAVYYCARDYYGSYDYWGRGTLVTVSS

SEQ ID NO: 24352 - protein, 94 aa, Homo sapiens
ASGYTFTTDAINWLRQAPGQGLEWMGWIHTGTGNPTYVQGFTGRFVFSLDTSVNTAYLQVSSLKAEDTAVYYCAKGASSRLAVWGQGTTVTVSS

SEQ ID NO: 24353 - protein, 94 aa, Homo sapiens
AFGYSFTSDAINWLRLAPGQGLDWMGWINTNTGTPTYVEGFTGRFVFSLDTSVSTAYLQISSLKTEDTAIYYCAKGASSRLAVWGQGTTVTVSS

SEQ ID NO: 24354 - protein, 94 aa, Homo sapiens
ASGYTFTTDAINWLRQAPGQGLEWMGWINTGTGNPTYVQGFTGRFVFSLDTSVNTAYLQVSSLKAEDTAVYYCAKGASSRLAVWGQGTTVTVSS

SEQ ID NO: 24355 - protein, 92 aa, Homo sapiens
VASGFTFSNYAMGWVRQSPGKGLEWVSTIGASAGGTFYADSVKGRFTISRDDSRDTLHLQMNSLSVEDTAVYYCAKGELVGWGQGTLVTVSS

SEQ ID NO: 24356 - protein, 91 aa, Homo sapiens
AASGFTFSSYVMGWVRQAPGKGLEWVSSISGGGESSTYAVSVKGRFTISRDNPKNTVYLQMNNPRAEDTAVYYCAKGELVGWGQGTLVTVS

SEQ ID NO: 24357 - protein, 94 aa, Homo sapiens
ASGGTFNNYALSWVRQAPGQGLEWMGGIIPIFGKANYAQKFQGRVTITADESTSTAYMELSSLRSEDTAVYYCARDGGSGSYFYWGQGTLVTVS

SEQ ID NO: 24358 - protein, 95 aa, Homo sapiens
ASGGTFSSYAISWLRQAPGQGLEWMGGIIPIFGRANYAQKFQGRVTITADESTSTAYMELNSLRSDDTAVYYCARDGGSGSYFYWGQGTLVTVSS

SEQ ID NO: 24359 - protein, 94 aa, Homo sapiens; identical to SEQ ID NO: 24357

SEQ ID NO: 24360 - protein, 94 aa, Homo sapiens
ASGGTFNLYDISWVRQAPGQGLEWMGGITPIFGTAKYAQKFQGRVTITADESTYTAYMELSSLRSDDTAVYYCARDGGSGSYFYWGQGTLVTVS

SEQ ID NO: 24361 - protein, 95 aa, Homo sapiens
ASGGTFNNYDISWVRQAPGQGLEWMGGITPAFGTAKYAQKFLGRVTITADVSTTTAYMEVRSLRSDDTAVYYCARDGGSGSYFYWGQGTLVTVSS

SEQ ID NO: 24362 - protein, 95 aa, Homo sapiens
ASGGTFTNYDISWVRQAPGQGLEWMGGITPIFGSAQYAQKFQGRVTITADESTRTAYMELSRLTSDDTAVYYCARDGGSGSYFYWGQGTLVTVSS

SEQ ID NO: 24363 - protein, 95 aa, Homo sapiens
ASGGTFTNYEITWVRQAPGQGLEWMGGITPLFAKANYAQKFQGRVTITADDSTTTAYMELSSLRFDDTAMYYCARDGGSGSYFYWGQGTLVTVSS

SEQ ID NO: 24364 - protein, 95 aa, Homo sapiens
ASGGTFTNYDISWVRQAPGQGLEWMGGITPIFGTPKYAQNFQGRVTISADESTSTAYMDLSSLTSDDTAVYYCARDGGSGSYFYWGQGTLVTVSS

SEQ ID NO: 24365 - protein, 95 aa, Homo sapiens
ASGGTFSNYDISWVRQAPGQGLEWMGGITPLFDRAKYAQKFQGRVTITADESTNTAYMELSSLRSDDTAVYYCARDGGSGSYFYWGQGTLVTVSS

SEQ ID NO: 24366 - protein, 95 aa, Homo sapiens
ASGGTFTNYDISWVRQAPGQGLEWMGGITPIFGSAQYAQKFQGRVTITADESTRTAYMELSRLTSDDTAVYYCARDGGSGSYFYWGQGTTVTVSS

SEQ ID NO: 24367 - protein, 94 aa, Homo sapiens; identical to SEQ ID NO: 24360

SEQ ID NO: 24368 - protein, 95 aa, Homo sapiens; identical to SEQ ID NO: 24365

SEQ ID NO: 24369 - protein, 95 aa, Homo sapiens
ASGGTFTNYDISWVRQAPGQGLEWMGGITPLFGRAKYAQKFQGRVTITADESTNTAYMELSSLRSDDTAVYYCARDGGSGSYFYWGQGTLVTVSS

SEQ ID NO: 24370 - protein, 95 aa, Homo sapiens
ASGGTFINYDISWVRQAPGQGLEWMGGITPIFGSAQYAHNFQGRVTITADPSTRTVYMDLSRLTSDDTAVYYCARDGGSGSYFYWGQGTLVTVSS

SEQ ID NO: 24371 - protein, 95 aa, Homo sapiens
ASGGTFSNYDISWVRQAPGQGLEWVGGITPLFNRANYAQKFQGRVTITADESTNTAYMELSSLRSDDTAVYYCARDGGSGSYFYWGQGTLVTVSS

SEQ ID NO: 24372 - protein, 95 aa, Homo sapiens
ASGGTFINYDISWVRQAPGQGLEWMGGITPIFGTAKYAQKFQGRVTITADESTSTAYMELSSLKSDDTAVYYCARDGGSGSYFYWGQGTLVTVSS

SEQ ID NO: 24373 - protein, 95 aa, Homo sapiens
ASGGTFTNYAISWVRQAPGQGLEWMGGITPIFGIVNYAQKFQGRVTITADESTTTAYMEVSSLRSDDTAVYYCARDGGSGSYFYWGQGTLVTVSS

SEQ ID NO: 24374 - protein, 95 aa, Homo sapiens
ASGGTFSNYEISWVRQAPGQGLEWMGGITPIFDTPKYAPKFQGRVTITADKSTSTTYMELTRLRSDDTAIYYCARDGGSGSYFYWGQGTLVTVSS

SEQ ID NO: 24375 - protein, 95 aa, Homo sapiens
ASGGTFINYDISWVRQAPGQGLEWMGGITPIFGSAQYAHNFQGRVTITADPSTRTVYMDLSRLTSDDTAAYYCARDGGSGSYFYWGQGTLVTVSS

SEQ ID NO: 24376 - protein, 94 aa, Homo sapiens
VASGFTFNNHWMNWVRQAPGKGLEWVGNINPDGSKKFYVDSMKGRFTISRDNAKGSLYLQMNSLRVDDTAMYYCARDGRTGDYWGQGALVTVSS

SEQ ID NO: 24377 - protein, 94 aa, Homo sapiens
AASGFTFSMHWMSWVRQAPGKGLEWVANIKQDGSEKYYVDSVKGRFIISRDNAENSLYLQMNSLRADDTAMYYCARDGRTGDYWGQGTLVTVSS

SEQ ID NO: 24378 - protein, 91 aa, Homo sapiens
VASGFTFSSYEMNWVRQAPGEGLEWVSEISSSGTTMYYADSVQGRFTISRDNAKNSLYLQMNSLRVEDTAVYYCAGRGDYWGQGTLVTVSS

SEQ ID NO: 24379 - protein, 90 aa, Homo sapiens
ASGFTFSDYEMNWVRQAPGKGLEWISEISGSGTIIHYADSVKGRFTISRDNAKKSVHLEMTSLRGEDTGVYYCAGRGDYWGQGTLVTVSS

SEQ ID NO: 24380 - protein, 97 aa, Homo sapiens
ISGDSVSSNSAAWNWFRQSPSRGLEWLGRTYYRSKWYNDYVVSVKSRIIINPDTSKNQFSLQLNSVTPEDTAVYYCARGRSYAFDIWGQGTMVTVSS

SEQ ID NO: 24381 - protein, 97 aa, Homo sapiens
ISGDSVSSNSVAWNWIRQSPSRGLEWLGRTYYGSKWYNDYAVSVKSRITINPDTSKDQFSLQLNSVTPEDTAVYYCARGRSYAFDIWGQGTMVTVSS

SEQ ID NO: 24382 - protein, 97 aa, Homo sapiens
ISGDSVSSDSAAWNWIRQSPSRGLEWLGRTYYRSKWYNDYAESVEGRITINPDTSKNHFSLQLNSVTPEDTAVYYCARGRSYAFDIWGQGTMVTVSS

SEQ ID NO: 24383 - protein, 97 aa, Homo sapiens
ISGDSVSSNSAAWNWIRQSPSRGLEWLGRTYYRSKWCNDYAVSVKSRITINPDTSKNQFSLQLNSVTPEDTAVYYCARGRSYAFDIWGQGTMVTVSS

SEQ ID NO: 24384 - protein, 101 aa, Homo sapiens
ASGYTFTSYYMHWVRQAPGQGLEWMGVINPSGGSTNYVQKFQGRVTMTRDTSTSTVYMELSSLRSEDTAVYYCARGIGERWLQLGGYFDYWGQGTLVTVSS

SEQ ID NO: 24385 - protein, 101 aa, Homo sapiens
ASGYTFTSYYMHWVRQAPGQGLEWMGIINPSGGSTNYAQKFQGRVTMTRDTSTSTVYMELSSLRSEDTAVYYCARGIGERWLQLGGYFDYWGQGTLVTVSS

SEQ ID NO: 24386 - protein, 101 aa, Homo sapiens
ASGYTFTNYYMHWVRQAPGQGLEWMGIINPSGGSTNFARKFQGRVTMTTDTSTTTVYMELSSLRSEDTAVYYCARGIGERWLQLGGYFDYWGQGTLVTVSS

SEQ ID NO: 24387 - protein, 101 aa, Homo sapiens
ASGYSFTNYYIHWVRQAPGQGLEWMGIVNPNSGSTNYAQRFQGRVTMTRDTSTSTTYMDLSSLTSDDTAIYYCARGIGERWLQLGGYFDYWGHGTLVTVSS

SEQ ID NO: 24388 - protein, 96 aa, Homo sapiens
AASGFTFSDYYMSWIRQAPGKGLEWVSYISSSGYTIYYADSVKGRFSISRDNAKNSLYLQMNSLRAEDTAVYYCARDSGGYYFDYWGQGTLVTVSS

SEQ ID NO: 24389 - protein, 96 aa, Homo sapiens
AVSGFTFSDYYMTWIRQAPGKGLEWLSYISSRGSTIYYADSVKGRFTISRDNAKNSLYLQMNSLRAEDTAVYYCARDSGGYYFDYWGQGTLVTVSS

SEQ ID NO: 24390 - protein, 96 aa, Homo sapiens
EASGFSFSSYWISWVRRVPEKGLELVANINEDGSVKNFVESVRGRFTISRDNAKNSLYLQMNSLRVDDTAVYYCARDPGSGAYDVWGQGTMVTVSS

SEQ ID NO: 24391 - protein, 96 aa, Homo sapiens
AASGFDFNTYWMSWVRQTPGKGLELVANINQDGGRNNYVDFVKGRFTISRDNTNKSLSLQMNSLRVEDTALYYCARDPGSGAYDVWGQGTMVTVSS

SEQ ID NO: 24392 - protein, 94 aa, Homo sapiens
AASGFTFSSYGLHWVRQAPGKGLEWVAVISYDGSDKYYADSVKGRFTISRDNSKNTLYLQMNSLRAEDTAVYYCAKDWGSLDYWGQGTLVTVSS

SEQ ID NO: 24393 - protein, 94 aa, Homo sapiens
AASGFTFSSYGMHWVRQAPGKGLEWVALISHDGSNKYHADSVKGRFTISRDNSKNTLYLQMNSLRAEDTAVYYCAKDWGSLDYWGQGTLVTVSS

SEQ ID NO: 24394 - protein, 93 aa, Homo sapiens
AASGFALGGYWMHWVRQAPGKGLVWVSRIKYDGSMTTYADSVKGRFTTSRDNAKNTLYLQMNSLRAEDTAVYYCAKSDWIDPRGQGTLVTVSS

SEQ ID NO: 24395 - protein, 93 aa, Homo sapiens
AASGFTLSGYWMHWVRQPPGKGLMWVSRIKYDGSFTTYADSVKGRFTISRDNAKNTLYLEMDSLRVEDTAVYYCAKSDWIDPWGQGTLVTVSS

SEQ ID NO: 24396 - protein, 94 aa, Homo sapiens
AASGFTFSSSWMTWVRQVPGKGLEWVATIKHDASEQYYVDSVKGRFTISRDNAENSLYLQMNSLRAEDTSVYYCVRGRSSMDVWGQGTTVTVSS

SEQ ID NO: 24397 - protein, 94 aa, Homo sapiens
AASGFTFTTSWMTWVRQVPGKGLEWVATIKQDGSEKYYVDSAEGRFTISRDNAKNSLYLQMNSLRAEDTAVYYCVRGRSSMDVWGQGTTVTVSS

SEQ ID NO: 24398 - protein, 94 aa, Homo sapiens; identical to SEQ ID NO: 24397

SEQ ID NO: 24399 - protein, 94 aa, Homo sapiens
AASGFTFGSSWMTWVRQAPGKGLEWVADIKLDASETYYVDSVKGRFTISRDNAKSSLYLQMNSLRAEDTAVYYCVRGRSSMDVWGQGTTVTVSS

SEQ ID NO: 24400 - protein, 94 aa, Homo sapiens
AASGFTFSSSWMTWVRQVPGKGLEWVATIKHDGSEQYYVDSVKGRFTISRDNAENSLYLQMNSLRAEDTAVYYCVRGRSSMDVWGQGTTVTVSS

SEQ ID NO: 24401 - protein, 94 aa, Homo sapiens
AASGFTFTTSWMTWVRQVPGKGLEWVATIKQDGSEKYYVDSAKGRFTISRDNAKNSLYLQMNSLRAEDTAVYYCVRGRSSMDVWGQGTTVTVSS

SEQ ID NO: 24402 - protein, 97 aa, Homo sapiens
AASGFTFSTYEMNWVRQAPGKGLECVSYIHGSGTTISYADSVKGRFTISRDNAKNSLYLQMNDLRAEDTAVYYCARDMGSGWSFDYWGQGTLVTVSS

SEQ ID NO: 24403 - protein, 96 aa, Homo sapiens
AASGITFSRYEMNWVRQAPGKGLECIAYISPSGTIYYADSVRGRFTISRDKAKESLYLQMNSLRAEDTAIYYCARDMGSGWSFDYWGQGIRVIVSS

SEQ ID NO: 24404 - protein, 96 aa, Homo sapiens
AASGITFSRYEMNWVRQAPGKGLECIAYISPSGTIYYADSVRGRFTISRDKAKESLYLQMNSLRAEDTAIYYCARDMGSGWSFDYWGQGTLVTVSS

SEQ ID NO: 24405 - protein, 96 aa, Homo sapiens
AASGITFSRYEMNWVRQAPGKGLECIAYISPSGTIYYADSVRGRFTISRDKAKESLYLQMNSLRAEDTAIYYCARDMGSGWSFDYRGQGIRVIVSS

SEQ ID NO: 24406 - protein, 97 aa, Homo sapiens; identical to SEQ ID NO: 24402

SEQ ID NO: 24407 - protein, 96 aa, Homo sapiens
AASGFTFSSYAMSWVRQSPGKGLEWLSSIGGSGANTYYADSVKGRFTISRDNSRNTVYLQMHNLRLDDTAVYYCAKVRGETSPDYWGQGTQVTVSS

SEQ ID NO: 24408 - protein, 96 aa, Homo sapiens; identical to SEQ ID NO: 24407

SEQ ID NO: 24409 - protein, 96 aa, Homo sapiens
AASGFTFSSYAMSWVRQSPGKGLEWLSSIGGSGSNTYYADSVKGRFTISRDNSKNTVYLQMHSLRVEDTAVYYCAKVRGETSPDYWGQGTQVTVSS

SEQ ID NO: 24410 - protein, 96 aa, Homo sapiens
AASGFTFSSYAMSWVRQSPGKGLEWLSSIGASGSNTYYADSVKGRFTISRDNSKNTVYLQMHSLRVEDTAVYYCAKVRGETSPDYWGQGTQVTVSS

SEQ ID NO: 24411 - protein, 96 aa, Homo sapiens
AASGFTFSSYAMSWVRQSPGKGLEWLTSISGSTGNTYYADSVKGRFTISRDNSKNTVYLQMHSLRVEDTAVYYCAKVRGETSPDYWGQGTQVTVSS

SEQ ID NO: 24412 - protein, 95 aa, Homo sapiens
ASGFTFSNYAMAWVRQAPGKGLEWVSSIIGSGDNTFYADSVKGRFTISRDNSKNTLYLQMNSLRAEDTAIYSCAKVRGETSPDYWGQGTLVTVSS

SEQ ID NO: 24413 - protein, 96 aa, Homo sapiens
AASGFTFSSYAMSWVRQSPGKGLEWLSSIGGSTGKTYYADSVKGRFTISRDNSKNTVYLQMHSLRVEDTAVYYCAKVRGETSPDYWGQGTQVTVSS

SEQ ID NO: 24414 - protein, 96 aa, Homo sapiens
AASGFTFSNYAMSWVRQSPGKGLEWLSSIGGTGINTYYADSVKGRFTISRDNSKNTVYLQMHSLRVEDTAVYYCAKVRGETSPDYWGQGTQVTVSS

SEQ ID NO: 24415 - protein, 97 aa, Homo sapiens
ASGYTFTDYYIHWVRQAPGQGLEWLGRINPNSGGANYAQRFQGRVTMTRDTSITTAYMELSRLRSDDTAVFYCARGDYSSGWYEDYWGQGTLVTVSS

SEQ ID NO: 24416 - protein, 97 aa, Homo sapiens
ASGYTFTDYYMHWVRQAPGQGLEWMGRINPNSGGTNYAQKFQGRVTMTRDTSISTAYMELSRLTSDDTAVYYCARGDYSSGWYEDYWGQGTLVTVSS

SEQ ID NO: 24417 - protein, 101 aa, Homo sapiens
VASGFSFSSYEMDWVRQAPGKGPEWISYISSSGSTIFNADSVKGRFIISRDNAKNSLYLQMNTLRVEDTAVYYCAREVVPHSSGYDAFDIWGRGTLVTVSS

SEQ ID NO: 24418 - protein, 101 aa, Homo sapiens
AASGFTFSNYEMDWVRQAPGKGPEWISYISSGASTKFYADSVKGRFTISRDDAKNSVYLQMNSLRAEDTATYYCAREVVPHSSGYDAFDIRGQGTMVTVSS

SEQ ID NO: 24419 - protein, 99 aa, Homo sapiens
SGFTPFPFSSYEMNWVRQAPGKGLEWISYIDYSSSAMYYADSVKGRFIISRDNAKNSLFLQMNSLRVDDTALYYCARRATVTYYALDVWGQGTTVTVSS

SEQ ID NO: 24420 - protein, 98 aa, Homo sapiens
AASGYTFSSYEMNWVRQAPGEGLEWISYINYSGTTIYYADSVKGRFTISRDNAKNSLYLQMNSLRVEDTAVYYCARRATVTYYALDVWGQGTTVTVSS

SEQ ID NO: 24421 - protein, 94 aa, Homo sapiens
AASGFTFSDYYMNWIRQAPGEGLECVAYISGGGTTIYYGDSVKGRFTVSRDNAKNSLYLQMNSLRAEDTAVYYCARGIYGMDVWGQGTTVTVSS

SEQ ID NO: 24422 - protein, 94 aa, Homo sapiens
AASGFSFRDFYMSWVRQAPGKGLEWVSYISYRSTHISYADSVKGRFTISRDDAKNTLYLQMDSLRGEDTAVYYCARGIYGMDVWGQGTTVTVSS

SEQ ID NO: 24423 - protein, 97 aa, Homo sapiens
AVSGFTFSGYEMNWVRQAPGKGLEWVSYISTSGSTTYYADSVKGRFTISRDNAKNSLYLQMDSLRAEDTAVYSCARERGSGSPFDYWGQGTLVTVSS

SEQ ID NO: 24424 - protein, 96 aa, Homo sapiens
GSGFTFSSFEMNWVRQAPGKGLEWVSYITTSGTTKYYADSVKGRFTISRDNAKSSLYLQMNSLRAEDTAVYYCARERGSGSPFDYWGQGTLVTVSS

SEQ ID NO: 24425 - protein, 96 aa, Homo sapiens
GSGFTFSSFEMNWVRQAPGKGLEWVSYITTSDTTKYYADSVKGRFTISRDNAKSSLFLQMNSLRAEDTAVYYCARERGSGSPFDYWGQGTLVTVSS

SEQ ID NO: 24426 - protein, 96 aa, Homo sapiens; identical to SEQ ID NO: 24425

SEQ ID NO: 24427 - protein, 100 aa, Homo sapiens
AASGFTFTNAWMSWVRQAPGKGLEWVGRIKSKAAAETTDYAAPAKGRFTISRDDSINTLYLQMNSLKTEDTAVYYCITTRGYTGYDLGYWGQGTLVTVSS

SEQ ID NO: 24428 - protein, 100 aa, Homo sapiens
AASGFTFTNAWMSWVRQAPGKGLEWVGRIKSKAGGETTDYAAPVKGRFTISRDDSKTTVYLQMNSLKTEDTAVYYCITTRGYTGYDLGYWGQGTLVTVSS

SEQ ID NO: 24429 - protein, 100 aa, Homo sapiens; identical to SEQ ID NO: 24428

SEQ ID NO: 24430 - protein, 93 aa, Homo sapiens
AASGFTLRSFWMTWVRQAPGEGLEWVANIKHDGSDTYYVDSVKGRFTISRDNAKNSLYLQMNSLRGDDTAVYYCGRGRGIDVWGQGTTVTVSS

SEQ ID NO: 24431 - protein, 93 aa, Homo sapiens
AASGFTFSNHWMSWVRQAPGKGLEWVANIKQDGSEKYYVDSVKGRFTISRDNAKNSLYLQMNSLRAEDTAVYYCGRGRGIDVWGQGTTVTVSS

SEQ ID NO: 24432 - protein, 95 aa, Homo sapiens
ASGYTFTGYYMHWVRQAPGQGLEWLGLINPNNSGTNYAQKFRGRVTVTRDTSISTAYMELSGLTSDDTAVYFCARELRGGHFDYWGHGTLVTVSS

SEQ ID NO: 24433 - protein, 95 aa, Homo sapiens
ASGYTFTDYYIHWVRQAPGQGPEWLGLIKPHDGGTNYAQKFQGRVTMTRDTSISTAFMDLSRLGSDDTAVYFCARELRGGHFDYWGQGTLVTVSS

SEQ ID NO: 24434 - protein, 94 aa, Homo sapiens
AASGFTFSSYVMSWVRQAPGKGLEWVSVISGNGGSTNYADSVKGRFTVSRDNSKNTLYLQMNSLRAEDTAVYYCAKGVTSLDYWGQGTLVTVSS

SEQ ID NO: 24435 - protein, 93 aa, Homo sapiens
AASGFMISTSGMSWVRRAPGKGLEWVSGVSYSGSIYYADSVKGRFTISRDNSKNTLSLQMNSLRAEDTALYYCAKGVTSLDYWGQGTLVTVSS

SEQ ID NO: 24436 - protein, 96 aa, Homo sapiens
AASGFTFSSCWMHWVRQAPGMGLVWVSRINSDGSSTTYADSVKGRFTISRDNAKNTVYLQMNSLRAEDTAVYYCARGGPGTGMDYWGQGTLVTVSS

SEQ ID NO: 24437 - protein, 96 aa, Homo sapiens
VASGSTFSHFWMHWVRQAPGEGLVWVSYVTGDGTATTYADSVKGRFTVSRDNAKNTLFLQMNSLRVDDTAVYYCARGGPGTGMDYWGQGSLVTVSS

SEQ ID NO: 24438 - protein, 95 aa, Homo sapiens
AASGFTFSNYWMHWVRQAPGKGLVWVSRIDTRGTTTNYVASVKGRFTISRDNAKNILYLQLNSLRADDTAVYYCARDLSGRYDYWSQGTLVTVSS

SEQ ID NO: 24439 - protein, 94 aa, Homo sapiens
DSGFTLRSYWMHWVRQAPGKGLVWVSRINIDGTITNYADSVKGRFTISRDNAKNTLYLQMNSLRAEDTAIYYCARDLSGRYDYWGQGTLVTVSS

SEQ ID NO: 24440 - protein, 100 aa, Homo sapiens
ASGYAFTTYGINWVRQAPGQGLEWMGWISAYNGNTKYAQKLQGRVTMTTDTSATTSYMELRSLRSDDTAVYYCARGRTGTTWYYYGMDVWGQGTTVTVSS

SEQ ID NO: 24441 - protein, 100 aa, Homo sapiens
ASGYSFTSYGISWVRQAPGQGLEWMGWISAYNGNTNFAQKLQGRVTMTTDTSTSTAYMELRSLRSDDTAVYYCARGRTGTTWYYYGMDVWGQGTTVTVSS

SEQ ID NO: 24442 - protein, 95 aa, Homo sapiens
AASGFTFSSHEMNWVRQAPGKGLEWVSYISSSGSTIYYADSVKGRFTISRNNAKNSLYLQLNSLRGEDTAVYYCARLRGAAAGYWGQGTLVTVSS

SEQ ID NO: 24443 - protein, 95 aa, Homo sapiens
AASGFTFSSYSINWVRQAPGKGLEWVSYISSSSNTIYYADSVKGRFTISRDNAKNSLYLQMNSLRAEDTAVYYCARLRGAAAGYWGQGTLVTVSS

SEQ ID NO: 24444 - protein, 95 aa, Homo sapiens
AASGFTFSTYSINWVRQAPGKGLEWVSYISSSSNTIYYADCVKGRFTISRDNAKNSLYLQMNSLRAEDTAVYYCARLRGAAAGYWGQGTLVTVSS

SEQ ID NO: 24445 - protein, 95 aa, Homo sapiens
AASGFTFSSYSINWVRQAPGKGLEWVSYISSSSNTIYYADSVKGRFTISRDNAKNSLYLQVNSLRAEDTAIYYCARLRGAAAGYWGQGTLVTVSS

SEQ ID NO: 24446 - protein, 95 aa, Homo sapiens
AASGFTFSSYSINWVRQAPGKGLEWVSYISGSSNTIYYADSVKGRFTISRDNAKNSLYLQMNSLRAEDTAIYYCARLRGAAAGYWGQGTLVAVSS

SEQ ID NO: 24447 - protein, 95 aa, Homo sapiens
AASGFSFSTYSMNWVRQAPGKGLEWVSYISSSSNTIYYADSVKGRFTISRDNAKNSLYLQMNSLRAEDTAVYYCARLRGAAAGYWGQGTLVTVSS

SEQ ID NO: 24448 - protein, 95 aa, Homo sapiens
AASGFTFSSYSINWVRQAPGKGLEWVSYISSSSNTIYYADSVKGRFSISRDNAKNSLYLQMNSLRAEDTAVYYCARLRGAAAGYWGQGTLVTVSS

SEQ ID NO: 24449 - protein, 98 aa, Homo sapiens
AASGFSLSRYDMGWVRQAPGKGLEWVSSTRNSAGITYYADFVKGRFTISRDNSKNTLFLQMNSLGAEDSAVYYCAKDLGTSGWYFDYWGQGTLVTVSS

SEQ ID NO: 24450 - protein, 97 aa, Homo sapiens
AASGFTFSSYDMSWVRQAPGKGLEWVSTIASGGTTYYADSVKGRFTISRDNSKNTLYLQMNSLTAEVTALYYCAKDLGTSGWYFDYWGQGALVTVSS

SEQ ID NO: 24451 - protein, 97 aa, Homo sapiens
AASGFTFSSYDMSWVRQAPGKGLEWVSTIASGGTTYYADSVKGRFTISRDNSKNTLYLQMNSLTAEVTALYYSAKDLGTSGWYFDYWGQGALVTVSS

SEQ ID NO: 24452 - protein, 97 aa, Homo sapiens
ASGFTFSSYGMSWVRQAPGKGLEWVSTIPAGPGNTYYADSVKGRFTISRDNSKNTLYLQMNSLRAEDTAIYYCAKDLGTSGWYFDYWGQGTLVTVSS

SEQ ID NO: 24453 - protein, 97 aa, Homo sapiens
AASGFTFSSYDMSWVRQAPGKGLEWVSTISSGGTTYYADSVKGRFTISRDNSKNTLYLQMNSLTAEVTALYYCAKDLGTSGWYFDYWGQGTLVTVSS

SEQ ID NO: 24454 - protein, 97 aa, Homo sapiens
AASGFTFSSYGMSWVRQAPGKGLEWVSTIASGGTTYYADSVKGRFTISRDNSKNTLYLQMNSLTAEVTALYYCAKDLGTSGWYFDYWGQGALVTVSS

SEQ ID NO: 24455 - protein, 98 aa, Homo sapiens
AASGFTFSSYAMSWVRQAPGKGLEWVSGISGSGDSTYYADSVRGRFTISRDNSKNTLYLQMNSLRAEDTAVYYCAKRHYYGSGSLDVWGQGTTVTVSS

SEQ ID NO: 24456 - protein, 98 aa, Homo sapiens
AASGFTFSSYAMSWVRQAPGKGLEWVSAISGSGDSTHYADSVKGRFTISRDNSKNTLYLQMNSLRAEDTAVYYCAKRHYYGSGSLDVWGQGTTVTVSS

SEQ ID NO: 24457 - protein, 101 aa, Homo sapiens
ASGGTFSNYAFNWVRQAPGQGLEWMGGIIPIFGTTNYAQKFQGRVTITADTSASTTTAYMELSSLRSEDTAVYYCARGNPYCSGGTCFDYWGQGTLVTVSS

SEQ ID NO: 24458 - protein, 99 aa, Homo sapiens
ASGGTFSNYAINWVRQAPGQGLEWMGRIIPISAIRKFAQTFEDRVTITADMSTSTVYMELTSLRSEDTAVYYCARGNPYCSGGTCFDYWGQGTLVTVSS

SEQ ID NO: 24459 - protein, 95 aa, Homo sapiens
AASGFAFSPYTMHWVRQAPGKGLVWVSRINGNGRTTTYADAVKGRLTISRDNAKNTLYLQMNSLRVEDTAVYFCARSIENGMDVWGQGTTVTVSS

SEQ ID NO: 24460 - protein, 95 aa, Homo sapiens
AASGFAFSDYTMHWVRQVPGKGPVWVSRINSDGATRTYADSVRGRFTISRDNAKRTLSLQLNSLRAEDTGVYYCARSIENGMDVWGQGTTITVSS

SEQ ID NO: 24461 - protein, 98 aa, Homo sapiens
AASGFTFNSYVISWVRQAPGEGLEWVSAIDSSGFSTYYADSVKGRFTISRDNSKNTLWLQMNSLRAEDTAIFYCARVNYGAGYYFDYWGQGTLVTVSS

SEQ ID NO: 24462 - protein, 98 aa, Homo sapiens
AASGFIFNNHVMSWVRQAPGQGLKWVSAINGNGDSTYYADSVKGRFTISRDNSKSTLSLQVNSLRPEDTGIYYCARVNYGAGYYFDYWGQGALVTVSS

SEQ ID NO: 24463 - protein, 96 aa, Homo sapiens
AASGFIFSDYYMDWVRQAPGKGLEWVARITKKATNYITQYAASVRGRFTISRDDSKNSLYLQMNSLETEDTAVYFCVRDLGGSDNWGQGTLVTVSS

SEQ ID NO: 24464 - protein, 96 aa, Homo sapiens
AASGFTFSDYYMDWVRQTPGKGLEWVGRIQNKAYSYSTHYAASVKGRFTISRDDSKTSVYLQMNSLKIEDTAVYYCVRDLGGSDNWGQGTLVTVSS

SEQ ID NO: 24465 - protein, 95 aa, Homo sapiens
AASGFTFNTYGFHWVRQAPGEGLEWVTYTSYDGSNKYYGDSVKGRFTISRDNSKNTLFLQMNSLRLEDTAVYYCARDRARAVDLWGQGTLVIVSS

SEQ ID NO: 24466 - protein, 95 aa, Homo sapiens
AASGFTFNIYAFHWVRQAPGKGLEWVAFISYDGSNKWYADSVKGRFTISRDNSKNTLYLQMNSLRVEDTAIYYCARDRARAVDLWGQGTMVTVSS

SEQ ID NO: 24467 - protein, 93 aa, Homo sapiens
AASGFTFSFYNMVWVRQAPGKGLEWISFISGSGDIIHYRDSVKGRFTISRDNAKTSLSLQMNSLRDEDTAVYYCVRAGNMEVWGQGTTVTVSS

SEQ ID NO: 24468 - protein, 93 aa, Homo sapiens
AASGFTFSDYNMNWVRQAPGKGLEWVSFIGSIISRTFYADSVKGRFIISRDNAKNLLSLEMNSLRDEDTAVYYCVRAGNMEVWGQGITVTVSS

SEQ ID NO: 24469 - protein, 95 aa, Homo sapiens
AASGFTFSAYAMTWVRQAPGKGLECVSYISDSGSRTNYADSVKGRFTVSRDNSKNTLYLQMNSLRADDTAVYYCVQKVYGDFPYWGQGTLVTVSS

SEQ ID NO: 24470 - protein, 95 aa, Homo sapiens
AASGFTFPIYAMTWVRQAPGKGLECVSYISSSGSNTKHADSVKGRFTISRDNSDNTLYLQMNSLRAEDTAVYYCVQKVYGDFPYWGQGTLVTVSS

SEQ ID NO: 24471 - protein, 96 aa, Homo sapiens
ISGDSVSSDSAAWNWIRQSPSRGLEWLGRTYYRSKWYNDYAVSVKSRITINPDTSKNQFSLQLNSVTPEDTAVYYCARDRAAFDIWGQGTMVTVSS

SEQ ID NO: 24472 - protein, 96 aa, Homo sapiens
ISGDSVSSNSAAWNWVRQSPSRGLEWLGRTYYRSKWYNDYAVSLKSRITITPDTSKNQFSLHLDSVTPEDTAVFYCARDRAAFDIWGQGTMVTVSS

SEQ ID NO: 24473 - protein, 96 aa, Homo sapiens
AASGFTFSDYWMGWVRQAPGKGLEWVANIRGDTSTITYVDSVKGRFTISRDNAMNSLFLQMSSLRADDTAVYYCARWGVIAGLDYWGQGTLVTVSS

SEQ ID NO: 24474 - protein, 96 aa, Homo sapiens
AASGFILNNYWMGWVRQAPGKGLEWVANINQGGSDKYYVGSVRGRFTISKDYAKNSMYLQMDSLTTEDTALYYCARWGVIAGLDYWGQGTLVTVSS

SEQ ID NO: 24475 - protein, 93 aa, Homo sapiens
KGSGYSFTSYWIGWVRQMPGEGLEWMGIIYPGDSETRYSPSFQGHVTISVDKSISTAYLQWSSLKASDTAIYYCARHDTFDVWGQGTMVTVSS

SEQ ID NO: 24476 - protein, 93 aa, Homo sapiens
KGSGYSFSSYWIGWVRQMPGKGLEWMGSIYAGDSETRYSPSFQGQVTISVDKSINTAYLQWKSLKASDTAMYYCARHDTFDVWGQGTMVTVSS

SEQ ID NO: 24477 - protein, 95 aa, Homo sapiens
AASGFTFSSFSMNWVRQAPGKGLEWISYITQSGGTTYDADSVRGRFTISRDNAKNSLYLQMNSLRDEDTAVYYCVRDHNYGLDYWGQGTLVTVSS

SEQ ID NO: 24478 - protein, 95 aa, Homo sapiens
AASGFTFSSYSLNWVRQAPGRGLEWVSYIGIDGVTIYSIDSVKGRFTISRDNAKNSLYLQMDSLRDDDSAVYYCVRDHNYGLDYWGQGILVTVSS

SEQ ID NO: 24479 - protein, 94 aa, Homo sapiens
AAFDFNFTNAWMSWVRQAPGKGLEWVGRIKSRFHGGTAHYAAPVQGRFTISRDDSKRSVYLQMNSLETEDTAVYYCVTDRLDYWGQGALVTVSS

SEQ ID NO: 24480 - protein, 94 aa, Homo sapiens
AASGFTFNSAWMSWVRQAPGKGLEWVGRVKSKTDGGAADYAAPVKGRFSISRDDSKNTVYVQMNSLKTDDTAVYYCVTDRLDYWGQGTLVSVSS

SEQ ID NO: 24481 - protein, 93 aa, Homo sapiens
ASEFNFSNGWMAWVRQAPGKGLEWVGRIKSKTDGGTADYAAPVKGRFTISRDDSKNTLSLQMSSLKSEDTAVYYCVTDRLDYWGQGTLVTVSS

SEQ ID NO: 24482 - protein, 96 aa, Homo sapiens
ASGYIFTGYFIHWVRQAPGQGLEYMGIVRPSDGKTGYAQKFQGRVTMTRDTSTSTVYMQLSSLISEDTALYYCAREPPNSFYFDYWGQGTLVTVSS

SEQ ID NO: 24483 - protein, 96 aa, Homo sapiens
ASGYTFTNYYMHWVRQAPGQGLEYMGIIYPSGGSTSYALNFQGRVTMTRDTSTSTVFMELSSLTSDDTALYYCAREPPNSFYFDYWGQGTLVTVSS

SEQ ID NO: 24484 - protein, 94 aa, Homo sapiens
GTSGFTFTNYWMSWVRQAPGKGLEWVGNIKPDGSEIYYMDSVKGRFTISRDNAHNSLDLQMNSLRVEDTAVYYCARVHLGERFWGQGTLVTVSS

SEQ ID NO: 24485 - protein, 94 aa, Homo sapiens
AASGFTFSTYWMSWVRQAPGKGLEWVGNINQDGSDKYYVDSVKGRFTISRDNAKNSLYLQMTSLRAEDTAVYYCARVHLGERFWGQGTLVTVSS

SEQ ID NO: 24486 - protein, 92 aa, Homo sapiens
VASGFTFSSNTMNWVRQAPGKGLEWVSYISSSSSIYYADSVKGRFTISRDNAKNSLYLQMNSLRDEDTAVYYCARKVPFDLWGRGTLVTVSS

SEQ ID NO: 24487 - protein, 93 aa, Homo sapiens
AASGFTVSTYTMNWVRQAPGKGLEWVSYISGSSSNAYYADSVKGRFTISRDNAKNSLYLQMNSLRAEDTAIYYCARKVPFDLWGRGTLVTVSS

SEQ ID NO: 24488 - protein, 97 aa, Homo sapiens
AASGYTFRAYAMGWVRQAPGKGLEWVSAISISGGSTFYADSVKGRFTISRDNSKTTLYLQMNSLRGEDTAIYYCAKRFGEGGHFDYWGQGTLVTVSS

SEQ ID NO: 24489 - protein, 98 aa, Homo sapiens
SGASGFTFSRYGMGWVRQAPGKGLEWVSAISRSGGSTFYAASVKGRFTVSRDNSKNTLDLQMNSLRVDDTAVYYCAKRFGEGGHFDYWGQGILVTVSS

SEQ ID NO: 24490 - protein, 96 aa, Homo sapiens
AASGFTFSIYSMNWVRQAPGKGLEWVSSISSSSTYIYNADSVKGRFTISRDNAKNSLYLQMNSLRAEDTAVYYCARDGGGWYFDYWGQGTLVTVSS

SEQ ID NO: 24491 - protein, 96 aa, Homo sapiens
AASGFTFNMYSMNWVRQAPGKGLEWVSSISSISTYIYYSDSVKGRFTISRDNTKNSLYLQMNSLRAEDTAVYYCARDGGGWYFDYWGPGILVTVSS

SEQ ID NO: 24492 - protein, 94 aa, Homo sapiens
AASGFTFSYYWMHWVRQAPGKGLVWVSRINPDGTSTNYADSVKGRFTISRDNAKKTLYLQMNSLTAEDTAVYYCARDHNGRDYWGQGSLVTVSS

SEQ ID NO: 24493 - protein, 94 aa, Homo sapiens
AASGFTFSYYWMHWFRQAPGKGLVWVSRINSDGSSNSYADSVKGRFTISRDNGKNTLYLQMNSLRAEDTAVYYCARDHNGRDYWGQGTLVTVSS

SEQ ID NO: 24494 - protein, 94 aa, Homo sapiens
AASGFTFSYYWMHWVRQAPGKGLVWVSRINSDGSSTNYADSVKGRFTISRDNAKNTLYLQMNSLRAEDTAVYYCARDHNGRDYWGQGTLVTVSS

SEQ ID NO: 24495 - protein, 95 aa, Homo sapiens
AASGFSFSDHWMIWVRQAPGKGPQWVATIKQDGSQTHYVDSVRGRFTISRDNAKNSLYLQMDSLRVDDTAVYFCARGSGWLSDYWGQGTLVTVSS

SEQ ID NO: 24496 - protein, 95 aa, Homo sapiens
AGSGFSFSHYWMNWVRQAPGKGLEWVAIINQDGSEKYYVDSVKGRFTISTDNAKNSLYLQMNSLRADDTAVYYCARGSGWLSDYWGQGTLVTVSS

SEQ ID NO: 24497 - protein, 95 aa, Homo sapiens
AASGFTFSAHWMIWVRQAPGKGLEWVATIKQDGSETYYVDSVKGRFTISRDNAKNSVYLQMNSLRAEDTAVYFCARGSGWLSDYWGQGTLVTVSS

SEQ ID NO: 24498 - protein, 95 aa, Homo sapiens
AASGFTFSAHWMIWVRQAPGKGLEWVATIKQDGSETYYVDSVKGRFTISRDNAKNSVYLQMNSLRAEDTAVYFCARGSGWLSDYWGPGTLVTVSS

SEQ ID NO: 24499 - protein, 98 aa, Homo sapiens
AASGFPFSSHWTHWVRQAPGKGLVWVSRINSDGSDTKYADSVKGRFTISRDNARNTLYLQMNSLRAEDTAVYYCARGGCSNPSCLDYWGQGTLVTVSS

SEQ ID NO: 24500 - protein, 98 aa, Homo sapiens
AASGFTFSTYWMHWVRQAPGKGLVWVSHIISDGSSTNYADAVKGRFTISRDNAKNTLYLQMNSLRAEDTAVYYCARGGCSNPSCLDYWGQGTLVTVSS

SEQ ID NO: 24501 - protein, 98 aa, Homo sapiens; identical to SEQ ID NO: 24500

SEQ ID NO: 24502 - protein, 92 aa, Homo sapiens
ASGFTFTDYFIHWVRQAPGQGLEWMGRINPKSGGATYAQKFKGRVTMTRDRSITTAYMELSRLTSDDTAFYYCARENYFQPWGQGTLVTVSS

SEQ ID NO: 24503 - protein, 92 aa, Homo sapiens
ASGFTFTNYFLHWVRQAPGQGLEWMGRMNPETGRATYARAFRGRLTMTRDTSTSTGYMELSGLTSADTAVYYCARENYFQPWGQGTLVIVSS

SEQ ID NO: 24504 - protein, 96 aa, Homo sapiens
AASRFTFSTYYMTWVRQAPGKGLEWVAHIKEDGSEKYYVDSVKGRFTISRDNAKNSLYLQMNSLRAEDTAVYYCARDSYSSGVDYWGQGTLVTVSS

SEQ ID NO: 24505 - protein, 96 aa, Homo sapiens
EAGGLTFSNYYMSWVRQAPGKGLEWVAHIKEDGSEKFYVDSVKGRFTISRDNAKNSLYLQMNSLRAEDTAVYYCARDSYSSGVDYWGQGALVTVSS

SEQ ID NO: 24506 - protein, 95 aa, Homo sapiens
AASGFTFSSYWMHWVRQAPGKGLVWVSHINTGGSSTNYAASVKGRFTISRDNAKNTLYLQMNSLRAEDTAVYYCARGDGGTYGYWGQGTLVTVSS

SEQ ID NO: 24507 - protein, 95 aa, Homo sapiens
AASGFTFSSYWMHWVRQAPGKGLVWVSVINSDGSRTNYADSVKGRFTISRDNAQNTLYLQVNSLRAEDTAVYYCARGDGGTYGYWGQGTLVTVSS

SEQ ID NO: 24508 - protein, 95 aa, Homo sapiens
AASGFTFSNYAMSWVRQAPGKGLEWVSAITGSGGSTYYADSVRGRFTISRDNSKNTVYLQMNSLRAEDTAVYYCAKRYYGAVDYWGQGTLVTVSS

SEQ ID NO: 24509 - protein, 95 aa, Homo sapiens
AASGFTFSSYAMSWVRQAPGKGLEWVSDICGSDGNTYYADSVKGRFTISRDNSKNTLSLQMNSLRAEDTAVYYCAKRYYGAVDYWGQGTLVTVSS

SEQ ID NO: 24510 - protein, 91 aa, Homo sapiens
AATFTIRRSWIHWFRQAPGKGLVWVSRIGPEGNGITYADSVRGRFTISRDNAQNTVYLQMNSLRGEDTAVYYCSRDKLDYWGQGTLVTVSS

SEQ ID NO: 24511 - protein, 92 aa, Homo sapiens
AASGFTFSRSWIHWFRQVPGKGLAWVSRINPDGGITNYADSVKGRFTISRDNAKNTVYLQMTSLRPEDTALYYCSRDKLDYWGPGTRVTVSS

SEQ ID NO: 24512 - protein, 101 aa, Homo sapiens
ASGYTFTYYYLHWVRQAPGQGLAWMGWINPKSGDTNSAQRFQGRVTMTRDTSISTVYMELTRLTSDDSAMYYCARDGREGYNFFYYAMDVWGQGTTVTVSS

SEQ ID NO: 24513 - protein, 100 aa, Homo sapiens
ASGYTFTFYYIHWVRQAPGQGPEWMGWINSKGGDTKYAQKFQGRVTMTRDTSINTAYMELSGLSSDDTAVYYCARDGREGYNFFYYAMDVWGQGTTVTVS

SEQ ID NO: 24514 - protein, 93 aa, Homo sapiens
AASGFTLSSYAMSWVRQAPGKGLEWVSVISASGTTTYYADSVKGRFTISRDNSKNTLYLQMNSLRAEDTAVYYCAKNYGMEVWGQGTAVTVSS

SEQ ID NO: 24515 - protein, 93 aa, Homo sapiens
AASGFTFSSYAMTWVRQAPGKGPEWVSLIRGSGGSTYYADSVKGRFTISRDNSKNTLYLQMNSLRAEDTAVYYCAKNYGMEVWGQGTTVTVSS

SEQ ID NO: 24516 - protein, 93 aa, Homo sapiens
AASGFTFSSYAMTWVRQAPGKGPEWVSLIRYSGGSTYYADSVKGRFTISRDNSKNTLYLQMISLRAEDTAVYYCAKNYGMEVWGQGTTVTVSS

SEQ ID NO: 24517 - protein, 93 aa, Homo sapiens; identical to SEQ ID NO: 24515

SEQ ID NO: 24518 - protein, 95 aa, Homo sapiens
AVSGFTFRNYWMSWVRQAPGKGLEWVANIKQDESEKFYVDSVKGRFTISRDNAKNSLYLQMNSLRAEDTAVYYCARATSNSWSYWGQGTLVTVSS

SEQ ID NO: 24519 - protein, 95 aa, Homo sapiens
AASGFTFSSYWMSWVRQAPGTGLEWVANIKQDESEKFYVDSVKGRFTISRDNAKNSLYLQMNSLRVEDTAVYYCARATSNSWSYWGQGTLVTVSS

SEQ ID NO: 24520 - protein, 94 aa, Homo sapiens
AASGFSFNTYWMHWVRQAPGKGLVWVSRINGDGSTTTYADSVKGRFTISRDNAKNALYLQMNSLSAEDTAVYYCARDRPPYDYWGQGTLVTVSS

SEQ ID NO: 24521 - protein, 94 aa, Homo sapiens
AASGFTFSSYWMHWVRQDPGKGLVSVSRINPGGSVTSYADSVKGRFTISRDNAKNTLYLHMNSLRAEDTAVYYCARDRPPYDYWGQGALVTVSS

SEQ ID NO: 24522 - protein, 96 aa, Homo sapiens
AGSGFAFSTYWMSWVRQGPGKGLEWVANIKQDGSDKYYVDSLKGRFTISRDNAKNSLYLQMNSLTTEDTAVYYCAAWSSSHWFDYWGQGTLVTVSS

SEQ ID NO: 24523 - protein, 96 aa, Homo sapiens
AGSGFDFSTYWMSWVRQGPGKGLEWVANIKYDGSEKNYVDSLKGRFTISRDNAKNSLYLQMSSLTTEDTAVYYCAAWSSSHWFDYWGQGTLVTVSS

SEQ ID NO: 24524 - protein, 96 aa, Homo sapiens
AGSGFTFSSYWMGWVRQAPGKGLEWMANIKQDGSEKLYLDSVKGRFTISRDNAKNSLYLQMNSLRAEDTAIYYCAAWSSSHWFDYWGQGTLVTVSS

SEQ ID NO: 24525 - protein, 98 aa, Homo sapiens
AASGFIFSEYGMHWVRQPAGRGLEWVGLIVSDGQEKQYADSVRGRFTISRDNSKDVLYLEIDNVRADDTALYLCARDDDRGDNALDVWGQGTMVTVSS

SEQ ID NO: 24526 - protein, 98 aa, Homo sapiens
AASGFTFSTYGMHWVRQPPGEGLEWLAVILSDGSKQFYADSVKGRFTISRDNSENTLYLQMNGLRAEDTAVYFCARDDDRGDNALDVWGQGTSVTVSS

SEQ ID NO: 24527 - protein, 96 aa, Homo sapiens
ASGYIFTSYAVHWLRQAPGQGLEWMAWINGGNGITMSSQKFQGRVTITRDTTASTAYMELRSLTSEDTAVYYCARQAVSGLNWFDPWGPGTEVTVS

SEQ ID NO: 24528 - protein, 97 aa, Homo sapiens
ASGYIFINYAVHWVRQAPGQRLEWMGWINGGNGYRDYSQKFRGRVTISRDTSATTHYMELSSLTFEDTAVYYCARQAVSGLNWFDPWGQGTLVTVSS

SEQ ID NO: 24529 - protein, 99 aa, Homo sapiens
TVSGDSISSSSYYWGWIRQPPGKGLEWIGSIYYSGTTYYNPSLKSRVTKSVDTSKNQFSLKLSSVTAPDTAVYYCARQVGSGKWYFDYWGQGTLVTVSS

SEQ ID NO: 24530 - protein, 99 aa, Homo sapiens
TVSGGSISIIGYFWGWIRQTPGEGLEWIGIKYYTGSSYYNLSLKSRVTISVDTSKNQFSLKLSSVTAADTAVYYCARQVGSGKWYFDYWGQGTLVTVSS

SEQ ID NO: 24531 - protein, 98 aa, Homo sapiens
KGSGYSFSTYWIGWVRQMPGKGLEWMGIIYPGDSDTRYSPSFQGQVTISADKSISTAYLQWSSLKASDTAMYYCARRLNYGDYYFDYWGQGTLISVSS

SEQ ID NO: 24532 - protein, 98 aa, Homo sapiens
KGSGYSFTTYWIGWVRQMPGKGLEWMALIYPGDSDIRYSPSFQGQVTISADKSITTAYLQWSSLKASDTAMYYCARRLNYGDYYFDYWGQGTLVTVSS

SEQ ID NO: 24533 - protein, 93 aa, Homo sapiens
AVYGGSFSNYYWSWIRQPPGRGLEWIGEINHSGTTNYNPSLESRVTISIDTSKNQFSLKLRSVTAADTAVYYCARGPGSTSDWGQGTLVTVAS

SEQ ID NO: 24534 - protein, 93 aa, Homo sapiens
AIYGGSLSDYYWSWIRQPPGKGLEWIGEINYSGSTTYNPSLKSRVAMSIDTSKNQFSLKLTSVTAADTAIYFCARGPGSTSDWGQGTLVSVSS

SEQ ID NO: 24535 - protein, 95 aa, Homo sapiens
AASGFTFSSYSMNWVRQAPGKGPEWVSYITRGSDTIYYADSVKGRFTISRDNAKNSLYLQMNSLRDEDTAVYYCARDRNYGFDYWGQGTPVTVSS

SEQ ID NO: 24536 - protein, 95 aa, Homo sapiens
AASGFTFSSYSMNWVRQAPGKGLEWISYFGAGSITSYYAESVKGRFTISRDNAKNSLYLQMNSLRDEDTAVYYCARDRNYGFDYWGQGILVTVSS

SEQ ID NO: 24537 - protein, 94 aa, Homo sapiens
ASGYTFTNYVMHWVRQAPGQRLEWMGWINAGNGNTKYSQKFQGRVTITRDTSASTAYMELSSLRSEDTAVYYCARGYSGSFDYWGQGTLVSVSS

SEQ ID NO: 24538 - protein, 94 aa, Homo sapiens
ASGYTFSSYIIHWVRQAPGQRFQWMGWISVGSGSTKYSQNFQGRVSITRDTSASTAYMELSSLRSEDTAVYYCARGYSGSFDYWGQGTLVTLSS

SEQ ID NO: 24539 - protein, 95 aa, Homo sapiens
AASGFTFSIYSMNWIRQAPGKGLEWVSYMTSDMKTIKYADSVRGRFTISRDNAKNTVFLQMNSLRDDDTALYYCARSVAGHFDNWGQGTQVIVSS

SEQ ID NO: 24540 - protein, 95 aa, Homo sapiens
AASGFDFNIYSMNWVRQAPGKGLEWVSYMTSNKALIHYADSVRGRFTISRDNAGRSLYLQMNSLGADDTAVYYCARSVAGHFDNWGQGTLVTVSS

SEQ ID NO: 24541 - protein, 97 aa, Homo sapiens
ISGDSVSSNSVAWNWIRQSPSRGLEWLGRTYYRSKWYNDYAGSVKSRITVNPDTSKNQFSLQLNSVTPEDTAVYYCARGKSYAFDIWGQGTMVTVSS

SEQ ID NO: 24542 - protein, 97 aa, Homo sapiens
ISGDTVSSYNVGWHWIRQSPSRGLEWLGRTFYRSKWYNDYAVSVKSRITINPDASKNQFSLQLNSVTPEDTAVYYCARGKSYAFDIWGQGTMVTVSS

SEQ ID NO: 24543 - protein, 97 aa, Homo sapiens
ISGDSVSSNSASWNWIRQSPSRGLEWLGRTYYRSNWYHDYAVSVKSRITVLPDTSKSQFSLQLNSVTPEDTAVYYCARGKSYAFDIWAQGTMVTVSS

SEQ ID NO: 24544 - protein, 101 aa, Homo sapiens
AASGFTFGTYAMSWVRQAPGKAPGKGLEWVSGITASGGTTDYADSVKGRFTISRDNSKNTLYLQMNSLRAEDTAVYYCAKDRGSSGFFDYWGQGTLVSVSS

SEQ ID NO: 24545 - protein, 96 aa, Homo sapiens
ASGGTFSSYAISWVRQAPGKGLEWVSAISGSGGSTYYADSVKGRFTISRDNSKNTLYLQMNSLRAEDTAVYYCAKDRGSSGFFDYWGQGTLVTVSS

SEQ ID NO: 24546 - protein, 102 aa, Homo sapiens
VSGGSIGSSSYFWGWIRQPPGKGLEWIGSVYYSGDTYYNPSLKNRVTISVDTSKNQFSLKLSSVTAADAAVYYCARRHIEATGTGSWYFDYWGQGTLVTVSS

SEQ ID NO: 24547 - protein, 102 aa, Homo sapiens; identical to SEQ ID NO: 24546

SEQ ID NO: 24548 - protein, 102 aa, Homo sapiens
VSGGSIGSSSYFWGWIRQPPGKGLEWIGSVYYSGDTYYNPSLKNRVTISVDTSKNQFSLKLSSVTAADAAVYYCARRHIEATGTGSWYFDYWSQGTLVTVSS

SEQ ID NO: 24549 - protein, 102 aa, Homo sapiens
VSGGSIGSSSYFWGWIRQPPGKGLEWIGSVYYSGDTYYNPSLKNRVTISVDTSKNQFSLKLSSVTAADAAVYYCARRHIEATGTGSWYFDYGGQGTLVTVSS

SEQ ID NO: 24550 - protein, 102 aa, Homo sapiens
VSGGSIGSSSYFWGRIRQPPGKGLEWIGSVYYSGDTYYNPSLKNRVTISVDTSKNQFSLKLSSVTAADAAVYYCARRHIEATGTGSWYFDYWGQGTLVTVSS

SEQ ID NO: 24551 - protein, 102 aa, Homo sapiens; identical to SEQ ID NO: 24546

SEQ ID NO: 24552 - protein, 102 aa, Homo sapiens
VSGGSIGSSSYFWGWIRQPPGKGLEWIGSVYYSGDTYYNPSLKNRVTISVDTSKNQFSLKLNSVTAADAAVYYCARRHIEATGTGSWYFDYWGQGTLVTVSS

SEQ ID NO: 24553 - protein, 102 aa, Homo sapiens; identical to SEQ ID NO: 24546

SEQ ID NO: 24554 - protein, 102 aa, Homo sapiens
VSGGSIGSSSHFWGWIRQPPGKGLEWIGSVYYSGDTYYNPSLKNRVTISVDTSKNQFSLKLSSVTAADAAVYYCARRHIEATGTGSWYFDYWGQGTLVTVSS

SEQ ID NO: 24555 - protein, 102 aa, Homo sapiens
VSGGSIGSSSYFWGWIRQPPGKGLEWIGSVYYSGDTYYNPFLKNRVTISVDTSKNQFSLKLSSVTAADAAVYYCARRHIEATGTGSWYFDYWGQGTLVTVSS

SEQ ID NO: 24556 - protein, 103 aa, Homo sapiens
TVSGASISSSSYFWGWIRQPPGKGLEWIGSIYYSGDTYYNPSLKSRVTISLHTSTNQFSLRLSSVTAADTAVYYCARRHIEATGTGSWYFDYWGQGTLVTVSS

SEQ ID NO: 24557 - protein, 97 aa, Homo sapiens
TVSGGSISSYYWSWIRQPPGKGLEWIGYIYYSGSTNYNPSLKSRVTISVDTSKNQFSLKLSSVTAADTAVYYCAVGGSGRMNYFDLWGRGSMVTVSS

SEQ ID NO: 24558 - protein, 97 aa, Homo sapiens
TVSGGSISNYYWSWIRQPPGKGLEWIGYIYYSGSTNYNPSLKSRVTISVDTSKNQFSLKLSSVTAADTAVYYCAVGGSGRMNYFDLWGRGSMVTVSS

SEQ ID NO: 24559 - protein, 97 aa, Homo sapiens
TVSGGSISSYYWSWIRQPPGKGLEWIGYIHNSGSTNYNPSLKSRVTISVDMSKNQFSLKLSSVTAADTAVYYCAVGGSGRMNYFDLWGRGSTVTVSS

SEQ ID NO: 24560 - protein, 97 aa, Homo sapiens
TVSGGSISSYYWSWIRQPPGKGLEWIGYIHNSGSTNYNPSLKSRVTISVDMSKNQFSLKLSSVTAADTAVYYCAVGGSGRMNYFDLWGRGSMVTVSS

SEQ ID NO: 24561 - protein, 97 aa, Homo sapiens
TVSGGSINSYFWSWIRQPPGKGLEWIGYVSYSGGTNYNPSLKSRVTMSVDTSKNQFSLKLTSVTAADTALYYCAVGGSGRMNYFDLWGRGTMVTVSS

SEQ ID NO: 24562 - protein, 97 aa, Homo sapiens
TVSGGSISSHYWSWIRQPPGKGLEWIGYTHYSGSTNYNPSLKSRVTISIDTSKNQFSLKLNSVTAADTAVYYCAVGGSGRMNYFDLWGRGSMVTVSS

SEQ ID NO: 24563 - protein, 97 aa, Homo sapiens
TVSGGSITSHYWSWIRQSPGKGLEWIGYISHSGSSNYNPSLKSRVTISIDTSKNQFSLKLSSVTAADTAVYYCAVGGSGRMNYFDLWGRGSMVTVSS

SEQ ID NO: 24564 - protein, 96 aa, Homo sapiens
TVSGGSIRSYYWSWMRQPPGKGLEWIGYIYYDGSTNYNPSLKSRVTISLDTSKNQFSLKLSSVIAADTAVYYCAVGGSGRMNYFDLWGRGSMVTVS

SEQ ID NO: 24565 - protein, 97 aa, Homo sapiens
TVSGGSINSYFWSWIRQPPGKGLEWIGYISYSGGTNYNPSLKSRVTMSVDTSKNQFSLKLTSVTAADTALYYCAVGGSGRMNYFDLWGRGTMVTVSS

SEQ ID NO: 24566 - protein, 97 aa, Homo sapiens
TVSGGSISSYYWSWIRQPPGKGLEWIGYIHHSGSTNYNPSLKSRVTISIDSSKNQFSLKLSYVTAADTAVYYCAVGGSGRMNYFDLWGRGSMVSVSS

SEQ ID NO: 24567 - protein, 97 aa, Homo sapiens; identical to SEQ ID NO: 24560

SEQ ID NO: 24568 - protein, 97 aa, Homo sapiens
TVSGGSISSYYWSWIRQSPRKGLEWIGYIHYSGSTNYNPSLKSRLSISIDTSKNQFSLKLISVTAADTAVYYCAVGGSGRMNYFDLWGRGSMVTVSS

SEQ ID NO: 24569 - protein, 97 aa, Homo sapiens
TVSGGSISSYYWSWIRQSPRKGLEWIGYIHYSGSTNYNPSLKSRLSISIDTSKNQFSLKLISVTTADTAVYYCAVGGSGRMNYFDLWGRGSMVTVSS

SEQ ID NO: 24570 - protein, 97 aa, Homo sapiens
TVSGGSISSYYWSWIRQPPGKGLEWIGYIYYSGGTNYNPSLKSRVTISVDTSKKQFSLKLSSVTAADTAVYYCAVGGSGRMNYFDLWGRGSMVTVSS

SEQ ID NO: 24571 - protein, 96 aa, Homo sapiens
TVSGGSIRSYYWSWIRQPPGKGLEWIGYIYYDGSTNYNPSLKSRVTISLDTSKNQFSLKLSSVIAADTAVYYCAVGGSGRMNYFDLWGRGSMVTVS

SEQ ID NO: 24572 - protein, 97 aa, Homo sapiens
TVSGGSISSYYWSWIRQPPGKGLEWIGYIYYSGSTNYNPSLKSRVTISVDTSMNQFSLKLSSVTAADTAVYYCAVGGSGRMNYFDLWGRGSMVTVSS

SEQ ID NO: 24573 - protein, 97 aa, Homo sapiens; identical to SEQ ID NO: 24560

SEQ ID NO: 24574 - protein, 97 aa, Homo sapiens
SVSGGSISNYYWSWIRQPPGKGLEWIGYVHYSGSTNYNPSLNSRVTISLDASKNKFSMKLTSVTAADTAVYYCAVGGSGRMNYFDLWGRGSMVTVSS

SEQ ID NO: 24575 - protein, 97 aa, Homo sapiens
TVSGGSISSYYWSWIRQPPGKGLEWIGYIHNSGSTNYNPSLKSRVTISLDMSKNQFSLKLSSVTAADTAVYYCAVGGSGRMNYFDLWGHGSMVTVSS

SEQ ID NO: 24576 - protein, 96 aa, Homo sapiens
VSGGSISSYYWTWIRQPPGKGLEWIGYISYSGGTNYNPSLKSRVTISVDTSKNQFSLKLTSVTAADTAVYYCAVGGSGRMNYFDLWGRGSMVTVSS

SEQ ID NO: 24577 - protein, 97 aa, Homo sapiens; identical to SEQ ID NO: 24559

SEQ ID NO: 24578 - protein, 96 aa, Homo sapiens
TVSGGSIRSYYWSWIRQPPGKGLEWIGYIYYDGSTNYNPSLKSRVTISLDTSKNQFSLKLSSVIAADTAVYFCAVGGSGRMNYFDLWGRGSMVTVS

SEQ ID NO: 24579 - protein, 96 aa, Homo sapiens
VSGGSISAYYWSWIRQPPGKGLEWIGYVHYTGSTNYNPSLKSRVTISIDTSRNQFALRLSSVTAADTAVYYCAVGGSGRMNYFDLWGRGSMVTVSS

SEQ ID NO: 24580 - protein, 97 aa, Homo sapiens
TVSGGSISSYYWSWIRQPPGKGLEWIGYISYSGGTNYNPSLRGRVTISVDTSKNQFSLKLRSVTGADTAVYYCAVGGSGRMNYFDLWGRGSMVTVSS

SEQ ID NO: 24581 - protein, 97 aa, Homo sapiens
TVSGGSISSYYWSWIRQPPGKGLEWIGYIHNSGSTNYNPSLKSRVTISVDMSKNHFSLKLSSVTAADTAVYYCAVGGSGRMNYFDLWGRGSMVTVSS

SEQ ID NO: 24582 - protein, 97 aa, Homo sapiens
TVSGGSISSYYWSWIRQPPGKGLEWIGYIYYSGSTNYNPSLKSRVTISVDTSKNQFSLKLSSVTAADTAVYYCAVGGSGRMNYFDLWGRGSLVTVSS

SEQ ID NO: 24583 - protein, 96 aa, Homo sapiens
VSGGSISNYYWSWIRQPPGKGLEWIGYIHNSGSTNYNPSLKSRVTISLDMSKNQFSLKLSSVTAADTAVYYCAVGGSGRMNYFDLWGHGSMVTVSS

SEQ ID NO: 24584 - protein, 97 aa, Homo sapiens
TVSGASISSYYWSWIRQPPGKGLEWIGYIYYSGSTNYNPSLKSRVTISVDTSKNQFSLKLSSVTAADTAVYYCAVGGSGRMNYFDLWGRGSMVTVSS

SEQ ID NO: 24585 - protein, 97 aa, Homo sapiens
TVSGASISSYYWSWIRQPPGKGLEWIGYIYYSGSTNYNPSLKSRVTISVDTSKNQFSLKLYSVTAADTAVYYCAVGGSGRMNYFDLWGRGSMVTVSS

SEQ ID NO: 24586 - protein, 97 aa, Homo sapiens
TVSGGSISSYYWTWIRQPPGKGLEWIGYIYYSGSTNYNPSLKSRVTMAIDTSKNQFSLKLNSVTAADTAVYYCAVGGSGRMNYFDLWGRGSMVTVSS

SEQ ID NO: 24587 - protein, 97 aa, Homo sapiens
TVSGGSISSYYWSWIRQPPGKGLEWIGYVYYTGSTNYNPSLKSRVTISIDTSKNQFSLKLSSVTAADTAVYYCAVGGSGRMNYFDLWGRGSMVTVSS

SEQ ID NO: 24588 - protein, 97 aa, Homo sapiens
TVSGGSISNYYWSWIRQPPGKGLEWIGYIYYSGDTNYNPSLQSRVTISIDTSKNQFSLKLTSVTAADTAVYYCAVGGSGRMNYFDLWGRGSMVTVSS

SEQ ID NO: 24589 - protein, 97 aa, Homo sapiens
TVSGGSISSYYWSWIRQPPGKGLEWIGYIHYSGSTNYNPSLKSRVTISVDTSKNQFSLKLSSVTAADTAVYYCAVGGSGRMNYFDLWGRGSMVTVSS

SEQ ID NO: 24590 - protein, 96 aa, Homo sapiens
TVSGGSIRSYYWSWIRQPPGKGLEWIGYIYYDGSTNFNPSLKSRVTISLDTSKNQFSLKLSSVIAADTAVYYCAVGGSGRMNYFDLWGRGSMVTVS

SEQ ID NO: 24591 - protein, 97 aa, Homo sapiens
TVSGGSISSYYWSWIRQPPGKGLEWIGFVYYTGSTNYNPSLKSRVTISVDTSKNQFSLKLSSVTAADTAVYYCAVGGSGRMNYFDLWGRGSMVTVSS

SEQ ID NO: 24592 - protein, 97 aa, Homo sapiens
TVSGGSISGFYWSWIRQPPGKGLEWIGYIHYSGSTNYNPSLKSRVTISIDASKNQFSLKLSSVTTADTALYYCAVGGSGRMNYFDLWGRGSMVTVSS

SEQ ID NO: 24593 - protein, 97 aa, Homo sapiens; identical to SEQ ID NO: 24581

SEQ ID NO: 24594 - protein, 97 aa, Homo sapiens; identical to SEQ ID NO: 24560

SEQ ID NO: 24595 - protein, 97 aa, Homo sapiens; identical to SEQ ID NO: 24557

SEQ ID NO: 24596 - protein, 96 aa, Homo sapiens; identical to SEQ ID NO: 24571

SEQ ID NO: 24597 - protein, 97 aa, Homo sapiens
TVSGGSISNYYWSWIRQPPGKGLEWIGYIYYSGSTNHNPSLKSRVTISIDTSRNQFSVKLSSVTAADTAVYYCAVGGSGRMNYFDLWGRGSMVTVSS

SEQ ID NO: 24598 - protein, 97 aa, Homo sapiens
TVSGGSISNYYWSWIRQPPGKGLEWIGYIHYSGSTNYNPSLKSRVTISLDTSKNQFSLRLNSVTAADTAVYFCAVGGSGRMNYFDLWGRGSMVTVSS

SEQ ID NO: 24599 - protein, 97 aa, Homo sapiens
TVSGGSINNYYWSWIRQPPGKGLQWIGYVSYSGSTNYNPSLKSRVTISIDTSKNQFSLKLNSVTAADTAVYYCAVGGSGRMNYFDLWGRGSMVTVSS

SEQ ID NO: 24600 - protein, 97 aa, Homo sapiens
TVSGASINNYYWSWIRQPPGKGLQWIGYIHNSGSTNYNPSLKSRVTISVDVSKNQFSLRLNSVTAADTAVYYCAVGGSGRMNYFDLWGRGSMVTVSS

SEQ ID NO: 24601 - protein, 96 aa, Homo sapiens
TVSGGSISSYYWSWIRQPPGKGLEWIGFIYHSGSTNYNPSLKSRVTMSVDTSKNQFSLKLSAMTAADTAVYYCAVGGSGRMNYFDLWGRGSMVTVS

SEQ ID NO: 24602 - protein, 97 aa, Homo sapiens
TVSGGSISSYYWSWIRQPPGKGLEWIGYISYSGGTNYNPSLKSRVTMSVDTSKNQFSLKLISVTAADTAVYYCAVGGSGRMNYFDLWGRGSMVTVSS

SEQ ID NO: 24603 - protein, 96 aa, Homo sapiens
VSGGSISSYYWSWIRQPPGKGLEWIGYAHYTGSTNYNPSLKSRVTISIDTSRNQFALRLTSVTAADTAVYYCAVGGSGRMNYFDLWGRGSMVTVSS

SEQ ID NO: 24604 - protein, 97 aa, Homo sapiens
TVSGDSISSYYWSWIRQPPGKGLEWIGYIHNSGSTNYNPSLKSRVTISVDMSKNQFSLKLSSVTAADTAVYYCAVGGSGRMNYFDLWGRGSMVTVSS

SEQ ID NO: 24605 - protein, 97 aa, Homo sapiens
TVSGGSMSSYYWSWIRQSPGKGLEWIGYIYYSGSTNYNPSLKSRVTISVDTSKNQFSLKLNSVTAADTAVYYCAVGGSGRMNYFDLWGRGSMVTVSS

SEQ ID NO: 24606 - protein, 97 aa, Homo sapiens
TVSGGSISSYYWSWIRQPPGKGLEWLGYIHNSGSTNYNPSLRSRVTISVDMSKNHFSLKLSSVTAADTAVYYCAVGGSGRMNYFDLWGRGSMVTVSS

SEQ ID NO: 24607 - protein, 96 aa, Homo sapiens
TVSGGSIRSFYWSWMRQPPGKGLEWIGYIYYDGSTNYNPSLKSRVTISLDTSKNQFSLKLSSVIAADTAVYYCAVGGSGRMNYFDLWGRGSMVTVS

SEQ ID NO: 24608 - protein, 96 aa, Homo sapiens
VSGGSISSYYWSWIRQPPGKGLEWIGYVHYTGSTNYNPSLKSRVTISIDTSRNQFALRLSSVTAADTAVYYCAVGGSGRMNYFDLWGRGSMVTVSS

SEQ ID NO: 24609 - protein, 97 aa, Homo sapiens
TVSGGSISSYFWSWIRQSPRKGLEWIGYIHSSGSVNYNPSLKSRITISIDTSKNQFSLKLSSVTAADTAMYYCAVGGSGRMNYFDLWGRGSMVTVSS

SEQ ID NO: 24610 - protein, 97 aa, Homo sapiens
IVSGGSISNYYWSWIRQPPGKGLEWIGYISYSGSTNSNPSLKSRVTISLDTSKNQFSLKLSSVTAADTAVYYCAVGGSGRMNYFDLWGRGSMVTVSS

SEQ ID NO: 24611 - protein, 96 aa, Homo sapiens
TVSGGSIRSYYWSWMRQSPGKGLEWIGYIYYDGSTNYNPSLKSRVTISLDTSKNQFSLKLSSVIAADTAVYYCAVGGSGRMNYFDLWGRGSMVTVS

SEQ ID NO: 24612 - protein, 97 aa, Homo sapiens
TVSGGSINNYYWSWIRQPPGKGLEWIGYIHYSGSTNYNPSLKSRVAISIDPSKNQFSLKLSSVTAADTAVYYCAVGGSGRMNYFDLWGRGSMVTVSS

SEQ ID NO: 24613 - protein, 97 aa, Homo sapiens
TVSGGSISSYYWSWIRQPPGKGLEWIGFIYSSGSTNYNPSLRSRVTISVDTSKNQFSLKLSSVTAADTAVYYCAVGGSGRMNYFDLWGRGSMVTVSS

SEQ ID NO: 24614 - protein, 96 aa, Homo sapiens; identical to SEQ ID NO: 24564

SEQ ID NO: 24615 - protein, 97 aa, Homo sapiens
TVSGGSISSYYWSWIRQPPGKGLEWIGYIYSSGSTNYNPSIKSRVTISLDTSKNQFSLKLSSVTAADTAVYYCAVGGSGRMNYFDLWGRGSMVTVSS

SEQ ID NO: 24616 - protein, 97 aa, Homo sapiens; identical to SEQ ID NO: 24589

SEQ ID NO: 24617 - protein, 97 aa, Homo sapiens; identical to SEQ ID NO: 24560

SEQ ID NO: 24618 - protein, 97 aa, Homo sapiens
TVSGGSISSYYWSWIRQPPEKGLEWIGYIHNSGSTSYNPSLKSRVTISLDMSKNRFSLKLSSVTAADTAVYYCAVGGSGRMNYFDLWGRGSMVTVSS

SEQ ID NO: 24619 - protein, 97 aa, Homo sapiens
TVSGGSISSYYWSWIRQPPGKRLEWIGYVSYTGGANYNPSLKGRVTISLDTSKSQFSLNLRSVTAADTAVYYCAVGGSGRMNYFDLWGRGTLVTVSS

SEQ ID NO: 24620 - protein, 97 aa, Homo sapiens
TVSGGSITNYYWSWIRQPPGKGLEWIGFIHYSGSTNYNPSLKSRVTISVDTSMNQFSLKLSSVTAADTAVYYCAVGGSGRMNYFDLWGRGSMVTVSS

SEQ ID NO: 24621 - protein, 97 aa, Homo sapiens
TVSGGSISSYYWSWIRQPPGKGLEWIGYVHYSGSTNYSPSLKSRVTISVDTSKNQFSLKLSSVTAADTAVYYCAVGGSGRMNYFDLWGRGSMVTVSS

SEQ ID NO: 24622 - protein, 97 aa, Homo sapiens; identical to SEQ ID NO: 24565

SEQ ID NO: 24623 - protein, 97 aa, Homo sapiens
TVSGGSISSYYWSWIRQPPGEGLEWIGYIYYSGSTNYNPSLKSRVTISIDTSKNQFSLKLTSVTAADTAVYYCAVGGSGRMNYFDLWGRGSMVTVSS

SEQ ID NO: 24624 - protein, 97 aa, Homo sapiens
TVSGGSISTYYWSWIRQPPGKGLEWIGYINYSGGTNYNPTLKSRVTISVDTSKNQFSLKLSSVTAADTAVYYCAVGGSGRMNYFDLWGRGSMVTVSS

SEQ ID NO: 24625 - protein, 97 aa, Homo sapiens
SVSGGSISSYYWSWIRQPPGKGLEWIGYIHASGSTNYNPSLKSRVTISVDTSQNQFSLKLTSVTAADTAVYYCAVGGSGRMNYFDLWGRGSMVTVSS

SEQ ID NO: 24626 - protein, 97 aa, Homo sapiens
TVSGASITSHYWSWIRQSPGKGLEWIGYIYHSGGTNYNPSLKSRVTISIDTSKNQFSLKLSSVTAADTAVYYCAVGGSGRMNYFDLWGRGSMVTVSS

SEQ ID NO: 24627 - protein, 97 aa, Homo sapiens
TVSGGSISTYYWSWIRQPPGKGLEWIGYIHYSGSTNYNPSLKSRVSISLDTSKNRFSLKLTSVTAADTAVYYCAVGGSGRMNYFDLWGRGSMVTVSS

SEQ ID NO: 24628 - protein, 97 aa, Homo sapiens
TVSGGSISNYYWSWIRQPPGKGLEWIGYIYYSGDTNYNPSLKSRVTISVDTSKNQFSLRLNSVTAADTAVYYCAVGGSGRMNYFDLWGRGSMVTVSS

SEQ ID NO: 24629 - protein, 97 aa, Homo sapiens
TVSGGSISSYYWSWIRQLPGKGLEWIGYIHNSESTNYNPSLKSRVTISVDMSKNQFSLKLSSVTAADTAVYYCAVGGSGRMNYFDLWGRGSMVTVSS

SEQ ID NO: 24630 - protein, 97 aa, Homo sapiens
TVSGGSISSYYWSWIRQPPGKGPEWIGYIHYSGSTNYNPSLKSRVTISLDTSKNRFSLEVTSVTAADTAVYYCAVGGSGRMNYFDLWGRGSMVTVSS

SEQ ID NO: 24631 - protein, 97 aa, Homo sapiens
SVSGGSISSYYWSWLRQPPGKGLEWIGYVHSSGSTNYHPSLKSRVTISLDTSRNQFSLKLNSVTARDTAIYYCAVGGSGRMNYFDLWGRGSMVTVSS

SEQ ID NO: 24632 - protein, 97 aa, Homo sapiens
TVSGGSISSYYWSWIRQPPGKGLEWIGYIHQSGSTNYNPSLKSRITISVDTSKNQFSLKLSSMTAADTAVYYCAVGGSGRMNYFDLWGRGSMVTVSS

SEQ ID NO: 24633 - protein, 97 aa, Homo sapiens
TVSGGSISSYYWSWIRQSPGKGLEWIGYIYYDGSTNYNPSLKSRVSISVDTSKNQFSLKLSSVTAADTAVYYCAVGGSGRMNYFDLWGRGSMVTVSS

SEQ ID NO: 24634 - protein, 97 aa, Homo sapiens
TVSGGSISSYYWSWIRQPPGKGLEWIGYIYYSGSTNYNPSLKSRVTISVDTSKNQFSLNLRSVTAADTAVYYCAVGGSGRMNYFDLWGRGSMVTVSS

SEQ ID NO: 24635 - protein, 97 aa, Homo sapiens; identical to SEQ ID NO: 24557

SEQ ID NO: 24636 - protein, 97 aa, Homo sapiens
TVSGASISSYYWSWIRQPPGKGLEWIGYVHNSGSTIYNPSLKSRATISIDMSKNQFSLKLTSVTAADTAVYYCAVGGSGRMNYFDLWGRGSMVTVSS

SEQ ID NO: 24637 - protein, 97 aa, Homo sapiens
TVSGGSISSYYWSWIRQPPGKGLEWIGYIHNSGSINYNPSLKSRVTMSVDMSKNQFSLKLSSVTAADTAVYYCAVGGSGRMNYFDLWGRGSMVTVSS

SEQ ID NO: 24638 - protein, 97 aa, Homo sapiens
TVSGGSISNYYWSWIRQPPGKGLEWIGYIHYSGSTNYNPSLKSRVTISVDTSKNQFSLKLSSVTAADTAVYYCAVGGSGRMNYFDLWGRGSMVTVSS

SEQ ID NO: 24639 - protein, 97 aa, Homo sapiens
TVSGGSISSYYWSWIRQPPGKGLEWIGYIHYSGSTNYNPSLKSRVTISLHTSKNQFSLKLSSVTAADTAVYYCAVGGSGRMNYFDLWGRGSMVTVSS

SEQ ID NO: 24640 - protein, 97 aa, Homo sapiens
SVSGGSISSYYWSWIRQPPGKGLEWIGYIHNSGSTSYNPSLKSRVTISVDMSKNQFSLKLSSVTAADTAMYYCAVGGSGRMNYFDLWGRGSMVTVSS

SEQ ID NO: 24641 - protein, 97 aa, Homo sapiens
TVSGGSISSYYWSWIRQPPGKGLEWIGYIYYSGSTNYNPSLKSRVTISVDTSKNQFSLKLGSVTAADTAVYYCAVGGSGRMNYFDLWGRGSMVTVSS

SEQ ID NO: 24642 - protein, 97 aa, Homo sapiens
TVSGGSISSYYWSWIRQPPGKGLEWIAYIHHSGSTNYNPSLRGRVAISVDTSKNQFSLKLRSVTAADTAVYYCAVGGSGRMNYFDLWGRGSMVTVSS

SEQ ID NO: 24643 - protein, 96 aa, Homo sapiens; identical to SEQ ID NO: 24576

SEQ ID NO: 24644 - protein, 96 aa, Homo sapiens; identical to SEQ ID NO: 24579

SEQ ID NO: 24645 - protein, 97 aa, Homo sapiens
TVSGGSITTYYWSWIRQPPGKGLEWIGYVYYSGSTNYNPSLKSRVTMSIDTSKNQFSLKLRSVTAADTAVYYCAVGGSGRMNYFDLWGRGSMVTVSS

SEQ ID NO: 24646 - protein, 97 aa, Homo sapiens
TVSGGSIRNYHWSWIRQPPGKGLEWIGYVHDSGSASYNPSLKSRVTISIDTSKNQFSLKLNSLTAADTAVYYCAVGGSGRMNYFDLWGRGSMVTVSS

SEQ ID NO: 24647 - protein, 97 aa, Homo sapiens
TVSGGSISTYYWSWIRQPPGKGLEWIGYIHYSGSTNYNPSLKSRVTISIDMSKNQFSLKLSSVTAADTAVYYCAVGGSGRMNYFDLWGRGSMVTVSS

SEQ ID NO: 24648 - protein, 97 aa, Homo sapiens
TVSGGSISTYYWSWIRQPPGKGLEWIGYFHSSGSTIYNPSLKSRVTISIDTSKNQFSLKLSSVTAADTAVYYCAVGGSGRMNYFDLWGRGSMVTVSS

SEQ ID NO: 24649 - protein, 97 aa, Homo sapiens
TVSGGSISSYYWSWIRQPPGKGLEWIGYIHYSGSTNYNPSLKSRVTISADTSRNQFSLKLSSVTAADTAVYYCAVGGSGRMNYFDLWGRGSMVTVSS

SEQ ID NO: 24650 - protein, 96 aa, Homo sapiens; identical to SEQ ID NO: 24571

SEQ ID NO: 24651 - protein, 96 aa, Homo sapiens; identical to SEQ ID NO: 24608

SEQ ID NO: 24652 - protein, 97 aa, Homo sapiens
TVSGGSIRNYYWSWIRQPPGKGLEWIGYIYYSGSTNYNPSLKSRVTISVDTSKNQFSLKLSSVTAADTAVYYCAVGGSGRMNYFDLWGRGSMVTVSS

SEQ ID NO: 24653 - protein, 97 aa, Homo sapiens; identical to SEQ ID NO: 24589

SEQ ID NO: 24654 - protein, 97 aa, Homo sapiens; identical to SEQ ID NO: 24557

SEQ ID NO: 24655 - protein, 97 aa, Homo sapiens; identical to SEQ ID NO: 24568

SEQ ID NO: 24656 - protein, 97 aa, Homo sapiens
TVSGGFISSYYWSWIRQPPGKGLEWIGYIHYSGSTNYNPSLKSRVTISVDTSKNQFSLKLSSMTAADTAVYYCAVGGSGRMNYFDLWGRGSMVTVSS

SEQ ID NO: 24657 - protein, 97 aa, Homo sapiens; identical to SEQ ID NO: 24557

SEQ ID NO: 24658 - protein, 97 aa, Homo sapiens
SVSGGSISSYYWSWIRQPPGKGLEWIGYIHNSGSTNYNPSLKSRVTISVDMSKNQFSLKLSSVTAADTAVYYCAVGGSGRMNYFDLWGRGSMVTVSS

SEQ ID NO: 24659 - protein, 97 aa, Homo sapiens
TVSGGSISSYYWSWIRQPPGKGLEWIGYISYTGGANYNPSLNSRVTISLDTSQSQFSLSLRSVTAADTAVYYCAVGGSGRMNYFDLWGRGTLVTVSS

SEQ ID NO: 24660 - protein, 97 aa, Homo sapiens
TVSGGSISSYYWSWIRQPPGKGLEWIGYMYYSGSTNYNPSLKSRVTISIDTSKNQFSLKLSSVTAADTAVYYCAVGGSGRMNYFDLWGRGSMVTVSS

SEQ ID NO: 24661 - protein, 96 aa, Homo sapiens
VSGGSISSYYWSWIRQPPGKGLEWIGYIHNSGSTNYNPSLKSRVTISVDMSKNQFSLKLSSVTAADTAVYYCAVGGSGRMNYFDLWGHGSMVTVSS

SEQ ID NO: 24662 - protein, 97 aa, Homo sapiens; identical to SEQ ID NO: 24585

SEQ ID NO: 24663 - protein, 97 aa, Homo sapiens
TVSGGSITTYYWSWVRQPPGKALEWIGYVSYTGGTNYNPSLKSRVTISLDISKNQFSLKLNSVTTADTAVYYCAVGGSGRMNYFDLWGRGSMVTVSS

SEQ ID NO: 24664 - protein, 97 aa, Homo sapiens
TVSGGSISSYYWSWIRQPPGKGLEWIGYIYYSGSTNYNPSLKSRVTISLDTSKNQFSLRLSSVTAADTAVYYCAVGGSGRMNYFDLWGRGSMVTVSS

SEQ ID NO: 24665 - protein, 97 aa, Homo sapiens
TVSGGSISSYYWSWIRQPPGKGLEWIGYIYYTGSTNYNPSLKSRVSISIDTSKNQFSLRLSSVTAADTAVYYCAVGGSGRMNYFDLWGRGSMVTVSS

SEQ ID NO: 24666 - protein, 96 aa, Homo sapiens
VSGGSITSHYWSWIRQSPGKGLEWIGYASHTGNSYYNPSLKSRVSISIDTSKNQFSLRLTSMSAADTAVYYCAVGGSGRMNYFDLWGRGSMVTVSS

SEQ ID NO: 24667 - protein, 97 aa, Homo sapiens
TVSGGSINNYYWSWIRQPPGKGLEWIGYSYYSGSSNYNPSLKSRVTISLDTSKNQFSLKLSAVTAADTAVYYCAVGGSGRMNYFDLWGRGSMVTVSS

SEQ ID NO: 24668 - protein, 97 aa, Homo sapiens; identical to SEQ ID NO: 24566

SEQ ID NO: 24669 - protein, 97 aa, Homo sapiens
TVSGGSISNYYWSWIRQPPGKGLEWIGYIYYSGSTNYNPSLKSRVTISVDTSKNQFSLKLSSVTAADTAVYYCAVGGSGRMNYFDLWGRGSMVTASS

SEQ ID NO: 24670 - protein, 97 aa, Homo sapiens; identical to SEQ ID NO: 24561

SEQ ID NO: 24671 - protein, 97 aa, Homo sapiens; identical to SEQ ID NO: 24575

SEQ ID NO: 24672 - protein, 97 aa, Homo sapiens
TVSGGSISSYYWSWIRQSPRKGLEWIGYIHYNGSTNYNPSLKSRLSISIDTSKNQFSLKLISVTAADTAVYYCAVGGSGRMNYFDLWGRGSMVTVSS

SEQ ID NO: 24673 - protein, 97 aa, Homo sapiens; identical to SEQ ID NO: 24557

SEQ ID NO: 24674 - protein, 97 aa, Homo sapiens
TVSGGSISSYYWSWIRQPPGKGLEWIGYIYYSGSTYYNPSLKSRVTISVDTSKNQFSLKLTSVTAADTAVYYCAVGGSGRMNYFDLWGRGSMVTVSS

SEQ ID NO: 24675 - protein, 97 aa, Homo sapiens
TVSGGSITSHYWSWIRQSPGNGLEWIGYIYHSGSTNYNPSLKSRVTISIDTSKNQFSLKLSSVTAADTAVYYCAVGGSGRMNYFDLWGRGSMVTVSS

SEQ ID NO: 24676 - protein, 97 aa, Homo sapiens
TVSGGSISSYYWSWIRQRPGKGLEWIGYIYYSGSTNSNPSLKSRVTMSVDTSKNQFSLKLTSVTAADTAVYYCAVGGSGRMNYFDLWGRGSKVTVSS

SEQ ID NO: 24677 - protein, 97 aa, Homo sapiens
TVSGGSISSYYWSWIRQPPGKGLEWIGYMYHSGSTNYNPSLKSRVTISVDTSKNQFSLKLSSVTAADTAVYYCAVGGSGRMNYFDLWGRGSMVTVSS

SEQ ID NO: 24678 - protein, 96 aa, Homo sapiens
TVSGGSIRSYFWSWIRQPPGKGLEWIGYIYYDGSTNYNPSLKSRVTISLDTSKNQFSLKLSSVIAADTAVYYCAVGGSGRMNYFDLWGRGSMVTVS

SEQ ID NO: 24679 - protein, 97 aa, Homo sapiens
TVSGGSISSYYWSWIRQPPGKGLEWIGYFHYSGSTNYNPSLKSRVTISVDTSKNQFSLKLSSVTAADTAVYYCAVGGSGRMNYFDLWGRGSMVTVSS

SEQ ID NO: 24680 - protein, 97 aa, Homo sapiens; identical to SEQ ID NO: 24557

SEQ ID NO: 24681 - protein, 97 aa, Homo sapiens
TVSGGSISNYYWSWIRQPPGKGLEWIGYIHYSGSTNYNPSLKSRVTISVDTSKNQFSLKLNSVTTRDTAVYYCAVGGSGRMNYFDLWGRGSMVTVSS

SEQ ID NO: 24682 - protein, 96 aa, Homo sapiens
VSGGSISNYYWSWIRQPPGKGLEWIGYISYSGGTNYNPSLKSRVSMSVDTSKNQFSLKVTSVTAADTAVYYCAVGGSGRMNYFDLWGRGSMVTVSS

SEQ ID NO: 24683 - protein, 97 aa, Homo sapiens
TVSGGSISSYYWSWIRQPPGKGLEWIGYIYYSGSTNYNPSLKSRVTISVDTSKNQFSLKLTSVTAADTAVYYCAVGGSGRMNYFDLWGRGSMVTVSS

SEQ ID NO: 24684 - protein, 96 aa, Homo sapiens
TVSGGSIRDYYWSWIRQPPGKGLEWIGYIYYDGSTNYNPSLKSRVTISLDTSKNQFSLKLSSVIAADTAVYYCAVGGSGRMNYFDLWGRGSMVTVS

SEQ ID NO: 24685 - protein, 97 aa, Homo sapiens; identical to SEQ ID NO: 24557

SEQ ID NO: 24686 - protein, 97 aa, Homo sapiens; identical to SEQ ID NO: 24559

SEQ ID NO: 24687 - protein, 97 aa, Homo sapiens; identical to SEQ ID NO: 24557

SEQ ID NO: 24688 - protein, 97 aa, Homo sapiens; identical to SEQ ID NO: 24557

SEQ ID NO: 24689 - protein, 97 aa, Homo sapiens; identical to SEQ ID NO: 24557

SEQ ID NO: 24690 - protein, 97 aa, Homo sapiens
TVSGGSISSYYWSWIWQPPGKGLEWIGYIHNSGSTNYNPSLKSRVTISVDMSKNHFSLKLSSVTAADTAVYYCAVGGSGRMNYFDLWGRGSMVTVSS

SEQ ID NO: 24691 - protein, 97 aa, Homo sapiens
TVSGGSISSYYWSWIRQPPGKGLEWIGYIYYSGSTNYNPSLKSRVTMAVDTSKNQFSLKLRSVTAADTAVYYCAVGGSGRMNYFDLWGRGSMVSVSS

SEQ ID NO: 24692 - protein, 97 aa, Homo sapiens
TVSGGSISSYYWSWIRQPPGKGLEWIGYIYSSGSTNYSPSLKSRVTISMDTSKNQFSLKLNSVTAADTAVYYCAVGGSGRMNYFDLWGRGSMVTVSS

SEQ ID NO: 24693 - protein, 97 aa, Homo sapiens
TVSGGSISNYYWSWIRQPPGKGLEWIGFIYYSGSTNYNPSLKSRVTISVDTSKSQFSLKLSSVTAADTAVYYCAVGGSGRMNYFDLWGRGTLVTVSS

SEQ ID NO: 24694 - protein, 97 aa, Homo sapiens; identical to SEQ ID NO: 24580

SEQ ID NO: 24695 - protein, 97 aa, Homo sapiens
TVSGGSIRSYYWSWIRQPPGKGLEWIGYIYYSGSTNYNPSLKSRVTISVDTSKNQFSLKLSSVTAADTAVYYCAVGGSGRMNYFDLWGRGSMVTVSS

SEQ ID NO: 24696 - protein, 97 aa, Homo sapiens
TVSGGSINSYFWSWIRQPPGKGLEWIGYVSYSGGTNYNPSLKSRVTMSVDTPKNQFSLKLTSVTAADTALYYCAVGGSGRMNYFDLWGRGTMVTVSS

SEQ ID NO: 24697 - protein, 97 aa, Homo sapiens
TVSGGSISNYYWSWIRQTPGKGLEWIGFIYYSGSTNYNPSLKSRVTISVDTSKNQFSLKLSSVTAADTAVYYCAVGGSGRMNYFDLWGRGSMVTVSS

SEQ ID NO: 24698 - protein, 97 aa, Homo sapiens
TVSGGSINSYFWSWIRQPPGKGLEWISYVSYSGGTNYNPSLKSRVTMSVDTSKNQFSLKLTSVTAADTALYYCAVGGSGRMNYFDLWGRGTMVTVSS

SEQ ID NO: 24699 - protein, 97 aa, Homo sapiens
TVSGGSINSYFWSWIRQPPGKGLEWIGYISYSGGTNYNPSLKSRVTMSVDTSKNQFSLKLTSVTTADTALYYCAVGGSGRMNYFDLWGRGTMVTVSS

SEQ ID NO: 24700 - protein, 97 aa, Homo sapiens
TVSGGSISSYYWSWIRQPPGKGLEWIGFIYYSGSTNYNPSLKSRVTISVDTSKNQFSLQLNSVTTADTAVYYCAVGGSGRMNYFDLWGRGSMVTVSS

SEQ ID NO: 24701 - protein, 97 aa, Homo sapiens
TVSGGSISNYYWSWIRQPPGKGLEWIGFISYSGSTNYNPSLKSRVTISIDTSKNQFSLRLASVSAADTAVYYCAVGGSGRMNYFDLWGRGTLVTVSS

SEQ ID NO: 24702 - protein, 96 aa, Homo sapiens
VSGGSISSYYWSWIRQPPGKGLEWIGYIYYSGSTNYNPSLKSRVTISLDTSKNQFSLKLSSVTAADTAVYYCAVGGSGRMNYFDLWGRGSMVTVSS

SEQ ID NO: 24703 - protein, 96 aa, Homo sapiens
SVSGGSIRDYYWSWIRQPPGKGLEWIGYIYYDGSTNYNPSLKSRVTISLDTSKNQFSLKLSSVIAADTAVYYCAVGGSGRMNYFDLWGRGSMVTVS

SEQ ID NO: 24704 - protein, 97 aa, Homo sapiens
TVSGGSISSYYWSWIRQPPGKGLEWIGYIYYSGSTNYNPSLKSRVTMSIDTSKNQFSLKLTSVTAADTAVYYCAVGGSGRMNYFDLWGRGSMVTVSS

SEQ ID NO: 24705 - protein, 97 aa, Homo sapiens
TVSGGSISDYYWSWIRQSPRRGLEWIGNIYHSGSTYYNPSLRSRVTISVDTSKNQFSLRLSSVTAADTAVYYCAVGGSGRMNYFDLWGRGSMVTVSS

SEQ ID NO: 24706 - protein, 97 aa, Homo sapiens
TVSGGSISSYYWSWIRQPPGKGLEWIGYISYTGSTYYNPSLKSRVTMSIDTSKNQFSLKLSSVTVADTALYYCAVGGSGRMNYFDLWGRGSMVTVSS

SEQ ID NO: 24707 - protein, 97 aa, Homo sapiens; identical to SEQ ID NO: 24681

SEQ ID NO: 24708 - protein, 97 aa, Homo sapiens; identical to SEQ ID NO: 24692

SEQ ID NO: 24709 - protein, 97 aa, Homo sapiens
TVSGGSISSYYWTWIRQPPGKGLEWIGYIHNSGSTNYNPSLKSRVTISVDMSKNQFSLKLSSVTAADTAVYYCAVGGSGRMNYFDLWGRGSMVTVSS

SEQ ID NO: 24710 - protein, 97 aa, Homo sapiens
TVSGGSISNFYWSWIRQPPGKGLEWMGYVHYSGSTNYNPSLKRRITISIDTSKNQFSLKLNSVTAADTAVYYCAVGGSGRMNYFDLWGRGSMVTVSS

SEQ ID NO: 24711 - protein, 97 aa, Homo sapiens
TVSGGSISSYYWSWIRQPPGKGLEWIGYIYYSGSTNYNPSLKSRVTISVDTSKNQFSLKLSSVTAADTAVYYCAVGGSGRMNYFDLWGRGSMVTVTS

SEQ ID NO: 24712 - protein, 97 aa, Homo sapiens
TVSGGSISSYYWSWIRQPPGKGLEWIGYIFYSGSTNYNPSLKSRVTMSVDTSKNQFSLKLSSVTAADTAVYYCAVGGSGRMNYFDLWGRGSMVTVSS

SEQ ID NO: 24713 - protein, 97 aa, Homo sapiens
TVSGGSISSYYWSWIRQTPGKGLEWIGYIHYSGSTNYNPSLKSRVTMSVDTSKNQFSLNLSSVTAADTAVYFCAVGGSGRMNYFDLWGRGSMVTVSS

SEQ ID NO: 24714 - protein, 97 aa, Homo sapiens
TVSGGSISNYYWSWIRQPPGKGLEWIGYIYYSGSTYYNPSLKSRVTISVDTSKNQFSLRLTSVTAADTALYYCAVGGSGRMNYFDLWGRGTMVTVSS

SEQ ID NO: 24715 - protein, 97 aa, Homo sapiens; identical to SEQ ID NO: 24557

SEQ ID NO: 24716 - protein, 97 aa, Homo sapiens
SVSGGSISAYHWSWIRQPPGKGLEWMGYIHASGSTNYNPSLKSRATMSVDTSQNQFSLKLTSVTAADTAVYYCAVGGSGRMNYFDLWGRGSMVAVSS

SEQ ID NO: 24717 - protein, 97 aa, Homo sapiens; identical to SEQ ID NO: 24557

SEQ ID NO: 24718 - protein, 97 aa, Homo sapiens
TVSGGSISSYYWSWIRQPPGKGLEWIGYIYYSGSTNYNPSLKSRVTISLDTSKNQFSLKLSSVTAADTAVYYCAVGGSGRMNYFDLWGRGSMVTVSS

SEQ ID NO: 24719 - protein, 97 aa, Homo sapiens
TVSGGSISTYYWSWIRQPPGKGLDWIGYIYYSGSTNYNPSLKSRVTISVDTSKNQFSLKLSSVTAADTAVYYCAVGGSGRMNYFDLWGRGSMVTVSS

SEQ ID NO: 24720 - protein, 97 aa, Homo sapiens
TVSGGSISSYYWSWIRQPPGKGLEWIGYIHYSGSTNYNPSLKSRVTISIDTSKNQFSLKLSSVTAADTAVYYCAVGGSGRMNYFDLWGRGSMVTVSS

SEQ ID NO: 24721 - protein, 97 aa, Homo sapiens
TVSGGSISSYYWSWIRQPPGKGLEWIGYVSYTGSTNYNPSLKSRVTISIDTSKNQFSLRLSSVSAADTAVYFCAVGGSGRMNYFDLWGRGSMVTVSS

SEQ ID NO: 24722 - protein, 97 aa, Homo sapiens
TVSGGSISSYYWSWIRQPPGKGLEWIGYIYYSGSTNYNPSLKSRVTISIDMSRNQFSLKLSSVTAADTAVYYCAVGGSGRMNYFDLWGRGSMVTVSS

SEQ ID NO: 24723 - protein, 97 aa, Homo sapiens
TVSGGSISNYYWSWIRQPPGKGLEWIGYIHYSGSTNYNPSLRSRVTISVDTSNNQFSLKVTSVTAADTAVYYCAVGGSGRMNYFDLWGRGSMVTVSS

SEQ ID NO: 24724 - protein, 97 aa, Homo sapiens
TVSGGSISRYYWSWIRQPPGKGLEWIGYIYYSGSTNYNPSLKSRVTISVDTSKNQFSLKLSSVTAADTAVYYCAVGGSGRMNYFDLWGRGSMVTVSS

SEQ ID NO: 24725 - protein, 96 aa, Homo sapiens
VSGGSISIYYWTWIRQPPGKGLEWIGYISYSGGTNYNPSLKSRVTISVDTSKNQFSLRLTSVTAADTAVYYCAVGGSGRMNYFDLWGRGSMVTVSS

SEQ ID NO: 24726 - protein, 97 aa, Homo sapiens
TVSGGSISDYFWSWIRQPPGKGLEWIGYVHYSGSTNYNPSLKSRVTISVDTSKNQFSLRLYSVTAADTAVYYCAVGGSGRMNYFDLWGRGSMVTVSS

SEQ ID NO: 24727 - protein, 97 aa, Homo sapiens
TVSGGSISSYYWSWIRQPPGKGLEWIGYISYSGSTNYNPSLKSRVTMSVDTSKNQFSLKLSSVTAADTALYYCAVGGSGRMNYFDLWGRGSMVTVSS

SEQ ID NO: 24728 - protein, 97 aa, Homo sapiens
TVSGGSISSYYWSWIRQPPGKGLEWIGYIHYSGSTNYNPSLKSRVTISVDTSKNQFSLKLSSVTAADTAVYYCAVGGSGRMNYFDLWGRGSMVTVTS

SEQ ID NO: 24729 - protein, 97 aa, Homo sapiens
SVSGGSISSYYWSWIRQPPGKGLEWIGYIHSSGSTNYNPSLKGRVTISVDMAKNQFSLNLISVTAADTAVYYCAVGGSGRMNYFDLWGRGSMVTVSS

SEQ ID NO: 24730 - protein, 97 aa, Homo sapiens
TVSGGSISSYYWSWIRQSPGKGLEWIGFIHYSGTTNYNPSLKSRGTISMDTSKNQFSLKLSSVTAADTAVYYCAVGGSGRMNYFDLWGRGSMVTVSS

SEQ ID NO: 24731 - protein, 97 aa, Homo sapiens
TVSGGSISSYYWSWIRQPPGKGLEWIGYIHYSGSTNYNPSLKGRVTISLDTSKNQFSLKLNSVTAADTAVYYCAVGGSGRMNYFDLWGRGSMVTVSS

SEQ ID NO: 24732 - protein, 97 aa, Homo sapiens; identical to SEQ ID NO: 24557

SEQ ID NO: 24733 - protein, 96 aa, Homo sapiens
TVSGGSIRSYYWSWIRQPPGKGLEWIGYINYDGSTNYNPSLKSRVTISLDTSKNQFSLKLSSVIAADTAVYYCAVGGSGRMNYFDLWGRGSMVTVS

SEQ ID NO: 24734 - protein, 97 aa, Homo sapiens
TVSGGSISSYYWSWIRQPPGKGLEWIGYIHDSGSTNYSPSLKSRATISADTSKNQFSLRLSSVTAADTAVYYCAVGGSGRMNYFDLWGRGSMVTVSS

SEQ ID NO: 24735 - protein, 97 aa, Homo sapiens
TVSGGSISSHYWSWIRQPPGKGLEWIGYIFYSGGTNYNPSLKSRVTISIDTSKNRFSLKLSSVTAADTAVYYCAVGGSGRMNYFDLWGRGSMVTVSS

SEQ ID NO: 24736 - protein, 96 aa, Homo sapiens; identical to SEQ ID NO: 24608

SEQ ID NO: 24737 - protein, 97 aa, Homo sapiens
TVSGGSISSYYWSWIRQPPGKGLEWIGYIHYTGSTNYNPSLKSRVTISVDTSKNQFSLKLISVTAADTAVYYCAVGGSGRMNYFDLWGRGSMVTVSS

SEQ ID NO: 24738 - protein, 97 aa, Homo sapiens
TVSGGSLSTYYWSWIRQPPGKGLEWIGYIHYSGSTNYNPSLNSRVTISVDTSKNQLSLKLSSVTAADTAVYYCAVGGSGRMNYFDLWGRGSMVTVSS

SEQ ID NO: 24739 - protein, 96 aa, Homo sapiens; identical to SEQ ID NO: 24571

SEQ ID NO: 24740 - protein, 97 aa, Homo sapiens; identical to SEQ ID NO: 24557

SEQ ID NO: 24741 - protein, 96 aa, Homo sapiens
TVSGGSIRNYYWSWIRQPPGKGLEWIGYIYDDGSTNYNPSLKSRVTISLDTSKNQFSLKLSSVIAADTAVYYCAVGGSGRMNYFDLWGRGSMVSVS

SEQ ID NO: 24742 - protein, 97 aa, Homo sapiens; identical to SEQ ID NO: 24729

SEQ ID NO: 24743 - protein, 97 aa, Homo sapiens
TVSGGSINNYYWSWVRQSPRKGLEWIGYISYTGGTNYNPSLKSRVTMSIDTSKNQFSLKLTSVTAADTAVYYCAVGGSGRMNYFDLWGRGSMVAVSS

SEQ ID NO: 24744 - protein, 97 aa, Homo sapiens
TVSGGSISSYYWSWIRQPPGKGLEWIGYIYYSGSTNYNPSLKSRVTISVDTSKNQFSLKLSYVTAADTAVYYCAVGGSGRMNYFDLWGRGSMVTVTS

SEQ ID NO: 24745 - protein, 96 aa, Homo sapiens; identical to SEQ ID NO: 24571

SEQ ID NO: 24746 - protein, 97 aa, Homo sapiens
TVSGGSISSYFWSWIRQPPGKGLEWIGYIHYSGSTNYNPSLKSRVTISIDTSKNQFSLKLSSVTAADTAVYYCAVGGSGRMNYFDLWGRGSMVTVTS

SEQ ID NO: 24747 - protein, 97 aa, Homo sapiens
TVSGGSISSYYWSWIRQPPGKGLEWIGYIYYDGSTNSNPSLKSRVTISVDTSKNQFSLKLSSVTAADTAVYYCAVGGSGRMNYFDLWGRGSMVTVSS

SEQ ID NO: 24748 - protein, 97 aa, Homo sapiens
TVSGGSISSYYWTWIRQPPGKGLEWIGYIYYSGSTNYNPSLKSRVTISVDTSKNQFSLKLSSVTAADTAVYYCAVGGSGRMNYFDLWGRGSMVTVSS

SEQ ID NO: 24749 - protein, 97 aa, Homo sapiens
TVSGGSISSYYWSWIRQPPGKGLEWIGYIHHSGSTNYNPSLKSRVTISIDTSKNQFSLKLRSVTAADTAAYYCAVGGSGRMNYFDLWGRGSKVAVSS

SEQ ID NO: 24750 - protein, 97 aa, Homo sapiens
TVSGGSISSYYWSWIRQPPGKGLEWIGYIYYNGNTNYNPSLKSRVTISVDTSKNQFSLKLSSVTAADTAVYYCAVGGSGRMNYFDLWGRGSMVTVSS

SEQ ID NO: 24751 - protein, 97 aa, Homo sapiens
TVSGGYISNYYWSWIRQPPGKGLQWIGYIHNSGDSYYNPSLKSRVSISIDTSKNQFSLKLSSVTAADTAVYYCAVGGSGRMNYFDLWGRGSMVTVSS

SEQ ID NO: 24752 - protein, 97 aa, Homo sapiens
TVSGGSISNYYWSWIRQPPGKGLEWIGYIHHSGSTNYNPSLKSRVTISMDTSNNQFSLRLRSVTAADTAVYFCAVGGSGRMNYFDLWGRGSKVAVSS

SEQ ID NO: 24753 - protein, 97 aa, Homo sapiens; identical to SEQ ID NO: 24557

SEQ ID NO: 24754 - protein, 97 aa, Homo sapiens
TISGGSVSSYYWSWIRQPPGKGLEWIGYIYYSGSTNYNPSLKSRVTISVDTSKNQFSLKLSSVTAADTAVYYCAVGGSGRMNYFDLWGRGSMVTVSS

SEQ ID NO: 24755 - protein, 96 aa, Homo sapiens
TVSGGSIRSYYWSWMRQPPGKGLEWIGYIYYDGSTNYNPSLKSRVTISLDTSKNQFSLKLTSVIAADTAVYYCAVGGSGRMNYFDLWGRGSMVTVS

SEQ ID NO: 24756 - protein, 96 aa, Homo sapiens
SVSGGSIRSYYWSWIRQPPGKGLEWIGYIYYDGSTNYNPSLKSRVTISLDTSKNQFSLKLSSVIAADTAVYYCAVGGSGRMNYFDLWGRGSMVTVS

SEQ ID NO: 24757 - protein, 96 aa, Homo sapiens
VSGGSINTYYWSWIRQPPGKGLEWIGYIHYSGSTNYNPSLKSRVTISIDTSKNQFSLRLNSVTAADTAVYYCAVGGSGRMNYFDLWGRGSMVTVSS

SEQ ID NO: 24758 - protein, 97 aa, Homo sapiens
TVSGGSISSYYWSWIRQPPGKGLEWLGFVYYSGSTNYNPSLKSRVTISIDTSKNQFSLKLTSVTAADTAVYYCAVGGSGRMNYFDLWGRGSMVTVSS

SEQ ID NO: 24759 - protein, 97 aa, Homo sapiens
TVSGGSISSYYWSWIRQPPGKGLEWIGFIHNSGSTNYNPSLKSRVTISVDMSKNQFSLKLSSVTAADTAVYYCAVGGSGRMNYFDLWGRGSMVTVSS

SEQ ID NO: 24760 - protein, 97 aa, Homo sapiens
TVSGGSISSYYWTWIRQPPGKGLEWIGYIYYSGSTYYNPSLKSRVTMSIDTSKNQFSLKLSSVTAADTAVYYCAVGGSGRMNYFDLWGRGSMVTVSS

SEQ ID NO: 24761 - protein, 97 aa, Homo sapiens
TVSGGSITNYYWSWIRQSPGKGLEWIGYIHHSGSTNYNPSLKSRVTISMDTSNNQFSLRLRSVTAADTAVYFCAVGGSGRMNYFDLWGRGSKVAVSS

SEQ ID NO: 24762 - protein, 97 aa, Homo sapiens
SVSGGSIRNYYWSWIRQTPGKGLEWIGYVHNSGSTNYNPSLKSRVTISVDTSKNHFSLKLNSVTAADTAVYYCAVGGSGRMNYFDLWGRGSRVTVSS

SEQ ID NO: 24763 - protein, 97 aa, Homo sapiens
TVSGGSISNYYWSWIRQPPGKGLEWIGYIYYSGSTNYNPSLKSRVTISLDTSKNQFSLKLSSVTAADTAVYFCAVGGSGRMNYFDLWGRGSMVTVSS

SEQ ID NO: 24764 - protein, 96 aa, Homo sapiens
TVSGGSIRSYYWSWIRQPPGKGLEWIGYIYYDGSTNYNPSLKSRVTTSLDTSKNQFSLKLSSVIAADTAVYYCAVGGSGRMNYFDLWGRGSMVTVS

SEQ ID NO: 24765 - protein, 97 aa, Homo sapiens
TVSGGSISSYYWTWLRQPPGKGLEWIGYIHYSGSTNYNPSLTSRVTISVDMSKNQFSLRLTSVTAADTAVYYCAVGGSGRMNYFDLWGRGSMVTVSS

SEQ ID NO: 24766 - protein, 97 aa, Homo sapiens
TVSGGSISSYYWSWIRQPPGKGLEWIGYIHNSGSTNHNPSLKSRVTISVDMSKNQFSLKLSYVTAADTAVYYCAVGGSGRMNYFDLWGRGSMVTVSS

SEQ ID NO: 24767 - protein, 97 aa, Homo sapiens
TVSGGSISSYYWSWIRQTPGKGLEWVGYINYSGSTSYNPSLRSRVTMSIDTSKNQFSLKLISVTAADTAVYYCAVGGSGRMNYFDLWGRGSMVTVSS

SEQ ID NO: 24768 - protein, 97 aa, Homo sapiens; identical to SEQ ID NO: 24557

SEQ ID NO: 24769 - protein, 97 aa, Homo sapiens
SVSGGSISSYYWSWIRQPPGKGLEWIGYVHYSGSANYNPSLKSRVTISVDTSKKQFSLKLSSVTAADTAVYYCAVGGSGRMNYFDLWGRGSMVTVSS

SEQ ID NO: 24770 - protein, 97 aa, Homo sapiens; identical to SEQ ID NO: 24589

SEQ ID NO: 24771 - protein, 97 aa, Homo sapiens
TVSGGSISNYFWSWIRQSPGKGLEWIGYIHNSGGTNYNPSLKSRVTISIDMSKNQFSLKLTSVTAADTAVYFCAVGGSGRMNYFDLWGRGSMVTVSS

SEQ ID NO: 24772 - protein, 97 aa, Homo sapiens; identical to SEQ ID NO: 24683

SEQ ID NO: 24773 - protein, 97 aa, Homo sapiens
TVSGGSISSFYWSWIRQPPGKGLEWIGYIHYSGSTNYNPSLKSRVTISIDTSKNQFSLKLTSVTAADTAVYYCAVGGSGRMNYFDLWGRGSMVTVSS

SEQ ID NO: 24774 - protein, 97 aa, Homo sapiens
TVSGGSISSYYWSWIRQPPGKGMEWIGYIYYSGSTNYNPSLKSRVTISIDTSKNQFSLKLSSVTAADTAVYYCAVGGSGRMNYFDLWGRGSMVTVSS

SEQ ID NO: 24775 - protein, 97 aa, Homo sapiens
TVSGGSINSYYWSWIRQPPGKGLEWIGYTYYSGSTNYNPSLKSRVTISVDTSRNQFSLKLSSVTAADTAVYYCAVGGSGRMNYFDLWGRGSMVTVSS

SEQ ID NO: 24776 - protein, 97 aa, Homo sapiens; identical to SEQ ID NO: 24602

SEQ ID NO: 24777 - protein, 97 aa, Homo sapiens
TVSGGSITSYYWSWIRQPPGKGPEWIGYIYYSGDTNYNPSLKSRVTISIDTSKNQFSLKLSYVTAADTAVYYCAVGGSGRMNYFDLWGRGSMVTVSS

SEQ ID NO: 24778 - protein, 97 aa, Homo sapiens
TVSGGPISSYYWTWVRQPPGKGLEWIGYIYYSGSTNYNPSLKSRVTISLDTSKNQVSLKLSSVTAADTAVYYCAVGGSGRMNYFDLWGRGSMVTVSS

SEQ ID NO: 24779 - protein, 97 aa, Homo sapiens; identical to SEQ ID NO: 24683

SEQ ID NO: 24780 - protein, 97 aa, Homo sapiens
TVSGGSISSYYWSWIRQPPGKGLEWIGYIYYSGSTNYNPSLKSRVTMSVDTSKNQFSLKLSSVTAADTAVYYCAVGGSGRMNYFDLWGRGSMVTVSS

SEQ ID NO: 24781 - protein, 97 aa, Homo sapiens
TVSGGSISSYYWSWIRQPPGKGLEWIGYIYYSGSTNYNPSLKSRVTISIDTSKNQFSLKLSSVTAADTAVYYCAVGGSGRMNYFDLWGRGSMVTVSS

SEQ ID NO: 24782 - protein, 97 aa, Homo sapiens
TVSGGSISSYYWSWIRQPPGKGLKWIGYIYYSGSTNYNPSLKSRVTISVDTSKNQFSLKLTSVTAADTAVYYCAVGGSGRMNYFDLWGRGSMVTVSS

SEQ ID NO: 24783 - protein, 96 aa, Homo sapiens
TVSGGSIRSYYWSWIRQPPGKGLEWIGYIYYDGSANYNPSLKSRVTISLDTSKNQFSLKLSSVIAADTAVYYCAVGGSGRMNYFDLWGRGSMVTVS

SEQ ID NO: 24784 - protein, 97 aa, Homo sapiens
TVSGGSISSYYWSWMRQPPGKGLEWIGYVHFSGSTNYNPSLKGRVTISVDTSKNQFSMRLTSVTAADTAVYYCAVGGSGRMNYFDLWGRGSMVTVSS

SEQ ID NO: 24785 - protein, 97 aa, Homo sapiens
TVSGGSISSYYWSWIRQTPGKGLEWIGYIYYSGSANYNPSLKSRVTISLDTSKNQFSLKLSSVTAADTALYYCAVGGSGRMNYFDLWGRGSMVTVSS

SEQ ID NO: 24786 - protein, 96 aa, Homo sapiens
TVSGGSIRSYYWSWIRQPPGKGLEWIGYIYYDGSTNYNPSLKSRVTISLDTSKNQFSLKLSSVIAADTAVYYCAVGGSGRMNYFDLWAVAPWSLSP

SEQ ID NO: 24787 - protein, 97 aa, Homo sapiens
TVSGGSISSYYWSWIRQPPGKGLEWIGYIYYSGSTNYNPSLESRVTISVDTSKNHFSLKLSSVTAADTAVYYCAVGGSGRMNYFDLWGRGSMVTVSS

SEQ ID NO: 24788 - protein, 96 aa, Homo sapiens
VSGGSISSYYWSWIRQPPGKGLEWIGYVHYTGSTNYNPSLKSRVTISIDTSRNQFALRLTSVTAADTAVYYCAVGGSGRMNYFDLWGRGSMVTVSS

SEQ ID NO: 24789 - protein, 97 aa, Homo sapiens
TVSGGSISSYYWSWIRQPPGKGLEWIGYIYYSGSTNYNPSLKSRVTISVHTSKNQFSLKLSSVTAADTAVYYCAVGGSGRMNYFDLWGRGSMVTVSS

SEQ ID NO: 24790 - protein, 97 aa, Homo sapiens; identical to SEQ ID NO: 24589

SEQ ID NO: 24791 - protein, 97 aa, Homo sapiens
TVSGGSIRSYYWSWIRQPPGKGLEWIGYIHNSGGTNYNPSLKSRVTISVDMSKNQFSLKLSSVTAADTAVYYCAVGGSGRMNYFDLWGRGSMVTVSS

SEQ ID NO: 24792 - protein, 97 aa, Homo sapiens
SVSGGSISSYYWSWIRQPPGKGLEWIGYIYYSGSTNYNPSLKSRVTISVDTSKKQFSLKLSSVTAADTAVYYCAVGGSGRMNYFDLWGRGSMVTVSS

SEQ ID NO: 24793 - protein, 97 aa, Homo sapiens
TVSGGSINSYYWSWIRQPPWKGLDWIGYISYSGGTNYNPSLKSRVTMSVDTSKNQFSLKLTSVTAADTALYYCAVGGSGRMNYFDLWGRGTMVTVSS

SEQ ID NO: 24794 - protein, 96 aa, Homo sapiens; identical to SEQ ID NO: 24576

SEQ ID NO: 24795 - protein, 96 aa, Homo sapiens
TVSGGSIRSYYWSWIRQPPGKGLEWIGYIYFDGSTNYNPSLKSRVTISLDTSKNQFSLKLSSVIAADTAVYYCAVGGSGRMNYFDLWGRGSMVTVS

SEQ ID NO: 24796 - protein, 97 aa, Homo sapiens; identical to SEQ ID NO: 24773

SEQ ID NO: 24797 - protein, 96 aa, Homo sapiens; identical to SEQ ID NO: 24564

SEQ ID NO: 24798 - protein, 97 aa, Homo sapiens
TVSGGSISSYYWSWIRQPPGKGLEWIGYTYYSGSTNYNPSLKSRVTISVDTSKNQFSLKLSSVTAADTAVYYCAVGGSGRMNYFDLWGRGSMVTVSS

SEQ ID NO: 24799 - protein, 96 aa, Homo sapiens
TVSGGSIRSYYWSWMRQPPGKGLEWIGYIYYDGSTNYNPSLKSRVTISLDTSKNQFSLKLISVIAADTAVYYCAVGGSGRMNYFDLWGRGSMVTVS

SEQ ID NO: 24800 - protein, 97 aa, Homo sapiens; identical to SEQ ID NO: 24557

SEQ ID NO: 24801 - protein, 97 aa, Homo sapiens
TVSGGSISSYYWSWIRQPPGKGLQWIGYIYYSGSTNYNPSLKSRVTISVDTSKNQFSLKLSSVTAADTAVYYCAVGGSGRMNYFDLWGRGSMVTVSS

SEQ ID NO: 24802 - protein, 96 aa, Homo sapiens; identical to SEQ ID NO: 24571

SEQ ID NO: 24803 - protein, 97 aa, Homo sapiens
TVSGGSISSYYWSWIRQPPGKGLEWIGYIHNSGSTNYNPSLKSRVTMSLDMSKNQFSLKLSSVTAADTAVYYCAVGGSGRMNYFDLWGRGSMVTVSS

SEQ ID NO: 24804 - protein, 97 aa, Homo sapiens
TVSGGSISSYYWSWIRQPPGKGLEWIGYIYYSGSTNYNPSLKSRVTTSVDTSKNQFSLKLSSVTAADTAVYYCAVGGSGRMNYFDLWGRGSMVTVSS

SEQ ID NO: 24805 - protein, 97 aa, Homo sapiens
TVSGGSISSYYWSWIRQPPGKGLEWIGYIYYSGSTNSNPSLKSRVTISVDTSKNQFSLKLSSVTAADTAMYYCAVGGSGRMNYFDLWGRGSMVTVTS

SEQ ID NO: 24806 - protein, 97 aa, Homo sapiens
TVSGGSISSYYWSWIRQPPGKGLEWVGYIYYTGSTNYNPSLKSRVTISVDTSKNQFSLKLSSVTAADTAVYYCAVGGSGRMNYFDLWGRGSMVTVSS

SEQ ID NO: 24807 - protein, 97 aa, Homo sapiens
TVSGGSISSYHWSWIRQPPGKGLEWIGYIHYSGSTNYNPSLKSRVTISIDTSKNQFSLRLSSVTAADTAVYYCAVGGSGRMNYFDLWGRGSMVTVSS

SEQ ID NO: 24808 - protein, 96 aa, Homo sapiens
TVSGGSISSYYWSWIRQPPGKGLEWIGYIYYSGSTNYNPSLKSRVTISVDTSKNQFSLKLSSVTAADTAVYYCAVGGSGRMNYFDLWGRGSMVTVS

SEQ ID NO: 24809 - protein, 97 aa, Homo sapiens
TVSGGSISSYYWSWIRQTPGKGLEWIGYVYYTGSTNYNPSLKSRVTISIDTSKNQFSLKLSSVTAADTAVYYCAVGGSGRMNYFDLWGRGSMVTVSS

SEQ ID NO: 24810 - protein, 96 aa, Homo sapiens
VSGGSITDYYWSWIRQSPGKGLEWIGYIHSSGSTNYKPSLKSRVTISIDTSRNQFSLRLTSVTAADTAVYYCAVGGSGRMNYFDLWGRGSMVTVSS

SEQ ID NO: 24811 - protein, 97 aa, Homo sapiens
TVSGGSISSYYWSWIRQPPGKGLEWIGYIYYSGSTNYNPSLKSRVTMSVDTSKNQFSLKLSSVTAADTAVYYCAVGGSGRMNYFDLWGRGSMVIVSS

SEQ ID NO: 24812 - protein, 97 aa, Homo sapiens; identical to SEQ ID NO: 24619

SEQ ID NO: 24813 - protein, 97 aa, Homo sapiens
TVSGGSISSYYWSWIRQPPGKGLEWIGYIYYSGSTNYNPSLKSRVTISVDTSKNQFSLKLSSVTAADTAVYYCAVGGSGRMNYFDLWGRGFMVTVSS

SEQ ID NO: 24814 - protein, 97 aa, Homo sapiens
TVSGGSISSYYWSWIRQPPGKGLEWIGYIHFSGSTNYNPSLKSRVIISVDTSKNQFSLKLSSVTAADTAVYYCAVGGSGRMNYFDLWGRGSMVTVSS

SEQ ID NO: 24815 - protein, 97 aa, Homo sapiens
TVSGGSISNYYWSWIRQPPGKGLEWIGYIYYSGSTNYNPSLKSRVTISIDTSKNQFSLKLTSVTAADTAVYYCAVGGSGRMNYFDLWGRGSMVTVSS

SEQ ID NO: 24816 - protein, 97 aa, Homo sapiens
TVSGGSISSYYWSWIRQSPGKGLEWIGYIHYSGSTNYNPSLKSRVTISIHTSKNQFSLKLSSVTAADTAVYYCAVGGSGRMNYFDLWGRGSMVTVSS

SEQ ID NO: 24817 - protein, 96 aa, Homo sapiens; identical to SEQ ID NO: 24564

SEQ ID NO: 24818 - protein, 96 aa, Homo sapiens
VSGGSISSYYWSWIRQPPGKGLEWIGYIHYSGSTNYNPSLKSRVTISMDSSKNQFSLKLKSVTAADTAVYYCAVGGSGRMNYFDLWGRGSLVTVSS

SEQ ID NO: 24819 - protein, 97 aa, Homo sapiens; identical to SEQ ID NO: 24625

SEQ ID NO: 24820 - protein, 97 aa, Homo sapiens; identical to SEQ ID NO: 24677

SEQ ID NO: 24821 - protein, 97 aa, Homo sapiens; identical to SEQ ID NO: 24606

SEQ ID NO: 24822 - protein, 97 aa, Homo sapiens; identical to SEQ ID NO: 24806

SEQ ID NO: 24823 - protein, 97 aa, Homo sapiens
TVSGGSISSYYWSWIRQPPGKGLEWIGFIHYSGSTNYNPSLKSRVTISVDTSKNQFSLKLRSVTAADTAVYFCAVGGSGRMNYFDLWGRGSVVTVSS

SEQ ID NO: 24824 - protein, 97 aa, Homo sapiens
TVSGDSISRHYWSWIRQPPGKGLEWIGYIHNSGSTNYNPSLKSRVTMSLDMSKNQFSLKLSSVTAADTAVYYCAVGGSGRMNYFDLWGRGSMVTVSS

SEQ ID NO: 24825 - protein, 97 aa, Homo sapiens; identical to SEQ ID NO: 24557

SEQ ID NO: 24826 - protein, 97 aa, Homo sapiens; identical to SEQ ID NO: 24565

SEQ ID NO: 24827 - protein, 97 aa, Homo sapiens
TVSGGSTSSYYWSWIRQPPGKGLEWIGYIYYSGSTNYNPSLKGRVTISVDTSKNQFSLKLSSVTAADTAVYYCAVGGSGRMNYFDLWGRGSMVTVSS

SEQ ID NO: 24828 - protein, 97 aa, Homo sapiens
TVSGGSISSYYWTWIRQPPGKGLEWIGYIYYSGSTNYNPSLKSRVTVSVDTSKNQFSLKLSSVTAADTAVYYCAVGGSGRMNYFDLWGRGSMVTVSS

SEQ ID NO: 24829 - protein, 97 aa, Homo sapiens; identical to SEQ ID NO: 24713

SEQ ID NO: 24830 - protein, 97 aa, Homo sapiens
IVSGGSISNYYWSWIRQSPGKGLEWIGYIHYTGATNYNPSLKSRVSISIDTSKNQFSLRLTSVTAADTAFYYCAVGGSGRMNYFDLWGRGTLVTVSS

SEQ ID NO: 24831 - protein, 97 aa, Homo sapiens
TVSGGSIRSYYWSWIRQPPGKGLEWIGYIFSSGSTNCNPSLKSRVTMSIDTSKNQFSLKLTSVTAADTAVYYCAVGGSGRMNYFDLWGRGSIVTVSS

SEQ ID NO: 24832 - protein, 97 aa, Homo sapiens
TVSGGSISSYYWSWIQQPPGKGLEWIGYIYYSGSTNYNPSLKSRVTISVDTSKNQFSLKLSSVTAADTAVYYCAVGGSGRMNYFDLWGRGSMVTVSS

SEQ ID NO: 24833 - protein, 97 aa, Homo sapiens
TVSGGSISSYYWSWIRQPPGKGLEWIGYIYYSGSTNYNPSLKSRVTISIDTSKNQFSLRLSSVTAADTAVYYCAVGGSGRMNYFDLWGRGSMVTVSS

SEQ ID NO: 24834 - protein, 97 aa, Homo sapiens
TVSGGSISSYYWSWIRQPPGKGLEWIGYIHYSGSTNYNPSLKSRVTISVDTSKNQFSLKLSSVTAADTAMYYCAVGGSGRMNYFDLWGRGSMVTVSS

SEQ ID NO: 24835 - protein, 97 aa, Homo sapiens
TVSGGSISSYYWSWIRQPPGKGLEWIGYIYYSGSTNYNPSLKSRVTISVDTSKNQFSLKLNSVTAADTAVYYCAVGGSGRMNYFDLWGRGSMVTVSS

SEQ ID NO: 24836 - protein, 97 aa, Homo sapiens
TVSGGSISSYYWSWIRQPPGKGLEWIGYIYYSGSTNYNPSLKSRVTISLDTSQNQFSLQLSSLTAADTAVYYCAVGGSGRMNYFDLWGRGSMVTVSS

SEQ ID NO: 24837 - protein, 97 aa, Homo sapiens
TVSGGSISRYYWSWIRQPPGKGLEWIGYIFYSGGTNYNPSLKSRVSISVDTSKNQFSLKLSSVTAADTAVYYCAVGGSGRMNYFDLWGRGSMVTVSS

SEQ ID NO: 24838 - protein, 96 aa, Homo sapiens
IVSGGSIRSYYWSWIRQPPGKGLEWIGYIYYDGSTNYNPSLKSRVTISLDTSKNQFSLKLSSVIAADTAVYYCAVGGSGRMNYFDLWGRGSMVTVS

SEQ ID NO: 24839 - protein, 97 aa, Homo sapiens
TVSGGSISSYYWSWLRQPPGKGLEWIGYIHYSGSTNNNPSLKSRVTISVDTSKNQFSLRLSSVTAADTAVYYCAVGGSGRMNYFDLWGRGSMVTVSS

SEQ ID NO: 24840 - protein, 97 aa, Homo sapiens
TVSGGSINSYFWSWIRQPPGKGLEWIGYVSYSGGTNYNPSLKSRVTMSVDTSKNQFSLKLTSVTAADTALYYCAVGGSGRMNYFDLWDRGTMVTVSS

SEQ ID NO: 24841 - protein, 97 aa, Homo sapiens; identical to SEQ ID NO: 24557

SEQ ID NO: 24842 - protein, 96 aa, Homo sapiens
TVSDGSIRSYYWSWIRQPPGKGLEWIGYIYYDGSTNYNPSLKSRVTISLDTSKNQFSLKLSSVIAADTAVYYCAVGGSGRMNYFDLWGRGSMVTVS

SEQ ID NO: 24843 - protein, 96 aa, Homo sapiens; identical to SEQ ID NO: 24564

SEQ ID NO: 24844 - protein, 97 aa, Homo sapiens
TVSGGSINSYYWSWIRQPPGKGLEWIGYIYYSGSTNYNPSLKSRVTISVDTSKNQFSLKLRSVTAADTAVYYCAVGGSGRMNYFDLWGRGSMVTVSS

SEQ ID NO: 24845 - protein, 97 aa, Homo sapiens; identical to SEQ ID NO: 24631

SEQ ID NO: 24846 - protein, 97 aa, Homo sapiens
TVSGGSISSYYWSWIRQPPGKGLEWIGYIHNSGSTNYNPSLKSRVTISVDRSKNQFSLKLSSVTAADTAVYYCAVGGSGRMNYFDLWGRGSRVTVSS

SEQ ID NO: 24847 - protein, 97 aa, Homo sapiens
TVSGGSISSYYWSWIRQPPGKGLEWIGYIYYSGSTNYNPSLKSRVTISVDTSKNQFSLKLSSVSAADTAVYYCAVGGSGRMNYFDLWGRGSMVTVTS

SEQ ID NO: 24848 - protein, 96 aa, Homo sapiens
TVSGGSIRSYYWSWIRQPPKKGLEWIGYIYYDGSINYNPSLKSRVTISLDTSKNQFSLKLSSVIAADTAVYYCAVGGSGRMNYFDLWGRGSMVTVS

SEQ ID NO: 24849 - protein, 97 aa, Homo sapiens
TVSGGSISSYYWSWIRQPPGKGLEWIGYIYYSGSTNYNPSLKSRVTISVDTSKNQFSLKLSSVTAADTAVHYCAVGGSGRMNYFDLWGRGSMVTVSS

SEQ ID NO: 24850 - protein, 96 aa, Homo sapiens; identical to SEQ ID NO: 24564

SEQ ID NO: 24851 - protein, 97 aa, Homo sapiens; identical to SEQ ID NO: 24557

SEQ ID NO: 24852 - protein, 97 aa, Homo sapiens; identical to SEQ ID NO: 24683

SEQ ID NO: 24853 - protein, 97 aa, Homo sapiens; identical to SEQ ID NO: 24724

SEQ ID NO: 24854 - protein, 97 aa, Homo sapiens
TVSGGSISSYYWSWIRQPPGKGLEWIGYFHYTGSTNYNPSLKSRVTISVDTSKNQFSLKLSSVTAADTAVYYCAVGGSGRMNYFDLWGRGSMVTVSS

SEQ ID NO: 24855 - protein, 97 aa, Homo sapiens; identical to SEQ ID NO: 24712

SEQ ID NO: 24856 - protein, 95 aa, Homo sapiens
VSGGSIRSYYWSWIRQPPGKGLEWIGYIYYDGSTNYNPSLKSRVTISLDTSKNQFSLKLSSVIAADTAVYYCAVGGSGRMNYFDLWGRGSMVTVS

SEQ ID NO: 24857 - protein, 97 aa, Homo sapiens
SVSGGSISTYYWSWIRQPPGKGLEWIGYVHYSGSTNYNPSLKSRVTISVDTSKKQFSLKLSSVTAADTAVYYCAVGGSGRMNYFDLWGRGSMVTVSS

SEQ ID NO: 24858 - protein, 97 aa, Homo sapiens
TVSGGSISSYYWSWIRQPPGKGLEWIGYIHNSGSTNYNPSLKSRVTISVDMSKNQFSLKLSSVTAADMAVYYCAVGGSGRMNYFDLWGRGSMVTVSS

SEQ ID NO: 24859 - protein, 97 aa, Homo sapiens; identical to SEQ ID NO: 24780

SEQ ID NO: 24860 - protein, 97 aa, Homo sapiens
TVSGGSISSYYWSWIRQPPGKGLEWIGYIHYSGSTNYNPSLKSRVTISVDTSKNQFSLRLTSVTAADTAVYYCAVGGSGRMNYFDLWGRGSMVTVSS

SEQ ID NO: 24861 - protein, 97 aa, Homo sapiens
TVSGGSISSYYWSWIRQPPGKGLEWIGYIYYSGSTNYNPSLKSRVTISLDTSKNQFSLKLTSVTAADTAVYYCAVGGSGRMNYFDLWGRGSMVTVSS

SEQ ID NO: 24862 - protein, 97 aa, Homo sapiens; identical to SEQ ID NO: 24557

SEQ ID NO: 24863 - protein, 97 aa, Homo sapiens
TVSGGSISSYYWSWIRQPPGKGLEWIGYIYYSGSTNYNPSLKSRVTMAVDTSKNQFSLKLSSVTAADTAVYYCAVGGSGRMNYFDLWGRGSMVTVSS

SEQ ID NO: 24864 - protein, 97 aa, Homo sapiens
TVSGGSISNYYWSWIRQPPGKGLEWIGFISYSGSTNYNPSLKSRVTISIDTSKNQFSLRLASVSAADTAVYYCAVGGSGRMNYFDLWGRGILVTVSS

SEQ ID NO: 24865 - protein, 97 aa, Homo sapiens; identical to SEQ ID NO: 24561

SEQ ID NO: 24866 - protein, 97 aa, Homo sapiens
TVSGGSISSYYWSWIRQPPGKGLEWIGYIYYSGSTNYNPSLKSRVTISVDTSKNQFSLKLSSVTAADTAIYYCAVGGSGRMNYFDLWGRGSMVTVSS

SEQ ID NO: 24867 - protein, 97 aa, Homo sapiens
TVSGGSITSYYWSWIRQPPGKGLEWIGYISYTGSTNYNPSIKSRVTMSVDTSKNQFSLNLSSVTAADAAVYFCAVGGSGRMNYFDLWGRGSMVTVSS

SEQ ID NO: 24868 - protein, 97 aa, Homo sapiens
SVSGGSISSYYWSWIRQPPGKGLEWIGYIYYSGSTNYNPSLKSRVTISVETSKNQFSLNLSSVTAADTAVYYCAVGGSGRMNYFDLWGRGSMVTVSS

SEQ ID NO: 24869 - protein, 97 aa, Homo sapiens
TVSGGSISSYYWSWVRQPPGRGLEWIGYIHNSGSTNCNPSLKSRVTISVDMSKNQFSLKLSSVTAADTAVYYCAVGGSGRMNYFDLWGRGSMVTVSS

SEQ ID NO: 24870 - protein, 97 aa, Homo sapiens
TVSGGSISNYHWSWIRQPPGKGLEWIGYVHDSGSASYNPSLKSRVTISIDTSKNQFSLKLNSLTAADTAVYYCAVGGSGRMNYFDLWGRGSMVTVSS

SEQ ID NO: 24871 - protein, 97 aa, Homo sapiens
IVSGGSISSYYWSWIRQPPGKGLEWIGYISYSGSTNSNPSLKSRVTISLDTSKNQFSLKLSSVTAADTAVYYCAVGGSGRMNYFDLWGRGSMVTVSS

SEQ ID NO: 24872 - protein, 97 aa, Homo sapiens
TVSGGSISSYYWSWIRQPPRKGLEWIGYISYTGSTYYNPSLKSRVTMSIDTSKNQFSLRLSSVTAADTAVYYCAVGGSGRMNYFDLWGRGSMVTVSS

SEQ ID NO: 24873 - protein, 97 aa, Homo sapiens; identical to SEQ ID NO: 24781

SEQ ID NO: 24874 - protein, 97 aa, Homo sapiens
TVSGGSINSYYWSWIRQPPGKGLEWIGYIYYSGSTNYNPSLKSRVTISVDTSKNQFSLKLSSVTAADTAVYYCAVGGSGRMNYFDLWGRGSMVTVSS

SEQ ID NO: 24875 - protein, 97 aa, Homo sapiens; identical to SEQ ID NO: 24835

SEQ ID NO: 24876 - protein, 97 aa, Homo sapiens
TVSGGSISSYYWSWIRQPPGKGLEWIGYIHDSGSTNYRPSLKSRATISADTSKNQFSLRLSFVTAADTAVYYCAVGGSGRMNYFDLWGRGSMVTVSS

SEQ ID NO: 24877 - protein, 97 aa, Homo sapiens; identical to SEQ ID NO: 24720

SEQ ID NO: 24878 - protein, 96 aa, Homo sapiens
TVSGGSIRSYYWSWIRQPPGKGLEWIGYIYYDGSTNYNPSLKSRVTISLDTPKNQFSLKLSSVIAADTAVYYCAVGGSGRMNYFDLWGRGSMVTVS

SEQ ID NO: 24879 - protein, 97 aa, Homo sapiens; identical to SEQ ID NO: 24588

SEQ ID NO: 24880 - protein, 97 aa, Homo sapiens
TVSGGSISNYYWSWIRQPPGKGLEWIGYIHYSGSTNYNPSLKSRVTISIDRSKNQFSLKMSYVTAADTAVYYCAVGGSGRMNYFDLWGRGSMVTVSS

SEQ ID NO: 24881 - protein, 97 aa, Homo sapiens
TVSGGSISTYYWSWIRQPPGKGLEWIGYIYYSGSTNYNPSLKSRVTISVDTSKNQFSLKLSSVTAADTAVYYCAVGGSGRMNYFDLWGRGSMVTVSS

SEQ ID NO: 24882 - protein, 97 aa, Homo sapiens
TVSGGSISSYYWSWIRQPPGKGLEWIGYIHYSGSTNYNPSLKSRVTMSIDTSKNQFSLKLSSVTAADTAVYYCAVGGSGRMNYFDLWGRGSMVTVSS

SEQ ID NO: 24883 - protein, 97 aa, Homo sapiens; identical to SEQ ID NO: 24620

SEQ ID NO: 24884 - protein, 97 aa, Homo sapiens; identical to SEQ ID NO: 24780

SEQ ID NO: 24885 - protein, 97 aa, Homo sapiens; identical to SEQ ID NO: 24823

SEQ ID NO: 24886 - protein, 97 aa, Homo sapiens
TVSGGSISSYYWSWIRQPPGKGLEWIGYIYYSGDTNYNPSLKSRVTISVDTSKNQFSLKLSSVTAADTAVYYCAVGGSGRMNYFDLWGRGSMVSVSS

SEQ ID NO: 24887 - protein, 95 aa, Homo sapiens
SVSGGSIRDYYWSWIRQPPGKGLEWIGYIYYDGSTNYNPSLKSRVTISLDTSKNQFSLKLSSVIAADTAVYYCAVGGSGRMNYFDLWGRGSMVTV

SEQ ID NO: 24888 - protein, 97 aa, Homo sapiens
TVSGGSISNYYWSWIRQPPGKGLEWIGYVYYSGSTNYNPSLKSRVTISVDTSKNQFSLKLTSVTAADTAVYYCAVGGSGRMNYFDLWGRGSMVTVSS

SEQ ID NO: 24889 - protein, 97 aa, Homo sapiens
TVSGGSISSYYWSWIRQPPGKGLEWIGYIHYSGSTNYNPSLKSRVTISVDMSKNQFSLKLSSVTAADTAVYYCAVGGSGRMNYFDLWGRGSMVTVSS

SEQ ID NO: 24890 - protein, 97 aa, Homo sapiens; identical to SEQ ID NO: 24710

SEQ ID NO: 24891 - protein, 97 aa, Homo sapiens
TVSGASISSYYWSWIRQPPGKGLQWIGYIYSNGDTNYNPSLKSRATISVDTSKNQFSLKLSSVTSDDTAMYYCAVGGSGRMNYFDLWGRGSMVTVSS

SEQ ID NO: 24892 - protein, 97 aa, Homo sapiens; identical to SEQ ID NO: 24683

SEQ ID NO: 24893 - protein, 96 aa, Homo sapiens
TVSGGSIRSYYWSWIRQPPGKGLEWIGYIYYDGSTNYNPSLKSRVTISVDTSKNQFSLKLSSVIAADTAVYYCAVGGSGRMNYFDLWGRGSMVTVS

SEQ ID NO: 24894 - protein, 97 aa, Homo sapiens
TVSGGSIRSYYWTWIRQPPGKGLEWIGYIYYSGSTNCNPSFKSRVTISVDTSKNQFSLKLSSVTAADTAVYYCAVGGSGRMNYFDLWGRGSMVTVSS

SEQ ID NO: 24895 - protein, 97 aa, Homo sapiens
TVSGGSISSYYWSWIRQSPRKGLEWIGYIHYSGSTNYNPTLKSRLSISIDTSKNQFSLKLISVTAADTAVYYCAVGGSGRMNYFDLWGRGSMVTVSS

SEQ ID NO: 24896 - protein, 97 aa, Homo sapiens
TVSGGSISSYYWSWIRQPPGKGLEWIGYIHYSGGTNYNPSLKSRVTISVDTSKKQFSLKLSSVTTADTAVYFCAVGGSGRMNYFDLWGRGSMVTVSS

SEQ ID NO: 24897 - protein, 96 aa, Homo sapiens; identical to SEQ ID NO: 24571

SEQ ID NO: 24898 - protein, 98 aa, Homo sapiens
VVSGFTFSNYIMNWVRQAPGKGLEWVSYISTSGNTIDYADSVKGRFTISRDNAKNSLYLQMNSLRAEDTAVYYCARGRGYSYGYSDYWGQGTLVTVSS

SEQ ID NO: 24899 - protein, 98 aa, Homo sapiens; identical to SEQ ID NO: 24898

SEQ ID NO: 24900 - protein, 98 aa, Homo sapiens
AASGFTFSGYSMNWVRQAPGKGLEWVSYISSSGNTLDYADSVKGRFTISRDNAKNSLYLQMNSLRDDDTAVYYCARGRGYSYGYSDYWSQGTLVTVSS

SEQ ID NO: 24901 - protein, 98 aa, Homo sapiens
AASGFTFSGYSMNWVRQAPGKGLQWISYISTSGNTIDYADSVKGRFTISRDNAKNSLYLQMSSLRDEDTAVYYCARGRGYSYGYSDYWSQGTLVIVSS

SEQ ID NO: 24902 - protein, 98 aa, Homo sapiens
AASGFTFSGYSMNWVRQAPGKGLEWVSYISTSGNTMDYADSVKGRFTISRDNAKNSLYLQMSSLRDEDSAVYYCARGRGYSYGYSDYWSQGTLVIVSS

SEQ ID NO: 24903 - protein, 93 aa, Homo sapiens
AASGFDFSTYGMKWVRQAPGKGLEWISDINGSGSDKNYADSVKGRFTISRDNAKNSLYLQMNSLRDEDTAVYYCARGTNLDYWGQGILVTVSS

SEQ ID NO: 24904 - protein, 93 aa, Homo sapiens
AASGFDFSTYGMKWVRQAPGKGLEWFSDINGSGSDKNYADSVKGRFTISRDNAKNSLYLQMNSLRDEDTAVYYCARGTNLDYWGQGILVTVSS

SEQ ID NO: 24905 - protein, 93 aa, Homo sapiens
AASGFDFSTYGMKWVRQAPGKGLEWISDINGSGSDKNYADSVKGRFTISRDNAKNSLYLQMNSLRDEDTTVYYCARGTNLDYWGQGILVTVSS

SEQ ID NO: 24906 - protein, 93 aa, Homo sapiens
AASRFTFSTYTMNWVRQAPGKGLEWVSYISRRNNTTYYADSVKGRFTISRDNAKNSLYLQMNSLRDEDTAVYYCARGTNLDYWGQGTLVTVSS

SEQ ID NO: 24907 - protein, 97 aa, Homo sapiens
AASGFTFSDYAMSWVRQAPGKGLEWISIITGSGSSTFHVDSVKGRFTISRDPSKNTVYLQMNSLRAEDTAIYYCAKTGGSHWGFDCWGQGTLVTVSS

SEQ ID NO: 24908 - protein, 97 aa, Homo sapiens
AASGFTFRDYAMSWVRQAPGKGLEWVSIITGDGGSTDYADSVKGRFTISRDNSKNTVQLQMNSLRAEDTAVYYCAKTGGSHWGFDCWGQGTLVTVSS

SEQ ID NO: 24909 - protein, 96 aa, Homo sapiens
ASGFTFRDYAMSWVRQAPGKGLEWVSIITGDGGSTDYADSVKGRFTISRDNSKNTVQLQMNSLRAEDTAVYYCAKTGGSHWGFDCWGQGTLVTVSS

SEQ ID NO: 24910 - protein, 97 aa, Homo sapiens; identical to SEQ ID NO: 24908

SEQ ID NO: 24911 - protein, 98 aa, Homo sapiens
AASGFTFSSNWMHWVRQAPGKGLVWVSHTNSDGSTTTYADSVKGRFTISRDNAKNTLYLQMNSLRVEDTAVYYCARGGCSSTSCLDHWGQGTLVTVSS

SEQ ID NO: 24912 - protein, 98 aa, Homo sapiens
AASGFTFRSYWMHWVRQVPGKGLVWVSRITSDGSVTTYTDSVKGRFTISRDNAKNTLDLQMNSLRAEDSAVYYCARGGCSSTSCLDHWGQGALVTVSS

SEQ ID NO: 24913 - protein, 91 aa, Homo sapiens
AASGFSLSTYAMNWFRQAPGKGPEWLSYISRTSDTIYYADSVKGRFTISRDNAKNSLYLQMNSLRVEDTAVYYCSREAAPWGQGTLVTVSS

SEQ ID NO: 24914 - protein, 91 aa, Homo sapiens
AASGFTFTTYAMNWVRQAPGKGLEWVSYISSDSITIYYADSVKGRFTISRDNAKNSLYLQMTSLRVEDTAVYYCSREAAPWGQGTLVTVSS

SEQ ID NO: 24915 - protein, 91 aa, Homo sapiens
AASGFTFSSYALNWFRRCPGKGLEWVSYISSSSTTIYYADSVKGRFTVSRDNAKNSLYLQMNSLRAEDTAVYYCSREAAPWGQGTLVTVSS

SEQ ID NO: 24916 - protein, 94 aa, Homo sapiens
TASGFTFGDSAMSWFRQAPGKGLEWVGFTRAKAHGGATEYAASVKGRFTISRDDSKSIAYLQMNSLKTEDTAVYYCTKGAFDYWGQGTLVTVSS

SEQ ID NO: 24917 - protein, 94 aa, Homo sapiens
TGSGFTFGESAMSWFRQAPGKGLEWVGFTRAKAHGGATEYAASVKGRFIISRDDSKSIAYLQMNSLKTEDTAVYYCTKGAFDYWGQGTLVTVSS

SEQ ID NO: 24918 - protein, 94 aa, Homo sapiens
TASGFTFGDNGMSWFRQAPGKGLEWVGFIRSKADGGTIEYAASVKGRFTISRDDSKSIAYLQMNSLKTEDTAVYYCTKGAFDYWGQGTLVTVSS

SEQ ID NO: 24919 - protein, 94 aa, Homo sapiens
TGSGFTFGESAMSWFRQAPGKGLEWVGFTRAKAHGGATEYAASVQGRFTISRDDSKSIAYLQMNSLKTEDTAVYYCTKGAFDYWGQGTLVTVSS

SEQ ID NO: 24920 - protein, 94 aa, Homo sapiens
TASGFTFGDSAVSWFRQAPGKGLEWVGFTRAKAHGGATEYAASVKGRFTISRDDSKSIAYLQLNSLKTEDTAVYYCTKGAFDYWGQGTLVTVSS

SEQ ID NO: 24921 - protein, 94 aa, Homo sapiens
KASGFTFGDHGMSWFRQAPGKGLEWVGFIRSKADGETTQYAASVNGRFTISRDDSKSIAYLQMNSLKTEDTAVYYCTKGAFDYWGQGTLVTVSS

SEQ ID NO: 24922 - protein, 94 aa, Homo sapiens
TASGFTFGDYGMSWFRQAPGKGLEWIGFIRSKPDGGTTEYAASVRGRFTISRDDAKSISYLQMNSLKTEDTGIYYCTKGAFDYWGQGTLVTVSS

SEQ ID NO: 24923 - protein, 99 aa, Homo sapiens
ISGDSVSSNSGGWNWIRQSPSRGLEWLGRTYYKSKTWYNDYAVSVRSRITINPDTSTNRFSLELNSVTPEDTGVYYCGRGWLQTGIDSWGQGSLVTVSS

SEQ ID NO: 24924 - protein, 98 aa, Homo sapiens
ISGDSVSTDSGGWNWIRQSPSRGLEWLGRTYFQSKWINDYAVSMRSRITIKADTSKNQFSLQVNSVTPDDTAIYYCGRGWLQTGIDSWGQGTLVTVSS

SEQ ID NO: 24925 - protein, 98 aa, Homo sapiens; identical to SEQ ID NO: 24924

SEQ ID NO: 24926 - protein, 99 aa, Homo sapiens
AASGFTFSTYAMNWVRQAPGKGLEWVSTIDGPTAGTWYADSVKGRFTISRDNSKNTLYLHMNSLRAEDTAAYYCAKVDYSNSRGYFDYWGQGTLVTVSS

SEQ ID NO: 24927 - protein, 99 aa, Homo sapiens
AASGFTFSTYAMNWVRQAPGKGLEWVSTIDGPTAGTWYADSVKGRFTISRDNSKNTLYLQMNSLRAEDTAEYYCAKVDYSNSRGYFDYWGQGTLVTVSS

SEQ ID NO: 24928 - protein, 99 aa, Homo sapiens
AGSGFTFGDYAMNWVRQAPGKGLEWVSTINYSGSGTYYDDSVRGRFTISRDNSRNTLYLQMDSLRVEDTAVYYCAKVDYSNSRGYFDYWGQGTLVTVSS

SEQ ID NO: 24929 - protein, 92 aa, Homo sapiens
ASGYTFTNYGISWVRQAPGQGLECMGWISPYNGNTDYAQKFQGRVTMTTDTSTNTAYLELRSLTSDDTAMYYCARDRQGSFWGQGTLVTVSS

SEQ ID NO: 24930 - protein, 92 aa, Homo sapiens
ASGYIFSHYGMTWVRQAPGQGLEWMGWININNAKTNFAQKFQGRLTMTTDTSTGTVYMELRRLTSDDTAVYYCARDRQGSFWGQGTLVTVSS

SEQ ID NO: 24931 - protein, 98 aa, Homo sapiens
VGSGFTFSGYSMNWVRQAPGKGLEWVSYISSSSTSTIHYADSVKGRFTISRDNAKNSVYLQMNSLRADDTSVYYCARTMVRGWGMDVWGQGTTVTVSS

SEQ ID NO: 24932 - protein, 97 aa, Homo sapiens
AASGLGFSGYSMNWVRQAPGKGLEWISYITTTSATIYYADSVQGRFTISRDNAKNSLYVQMNSLRDDDTAVYYCARTMVRGWGMDVWGQGTTVTVSS

SEQ ID NO: 24933 - protein, 97 aa, Homo sapiens
AVSGFTVSGYWMHWVRQAPGKGLVFVSRINDDGTYTNYADSIKGRFTISRDNAKNTLFLQMNSLRAEDTAVYYCVRGTSDWRGIDYWGQGTLVTVSS

SEQ ID NO: 24934 - protein, 97 aa, Homo sapiens
EASGFTFSHYWMHWVRQGPGKGLVWVSRISDDRHTIDYADSVKGRFTISRDDAKNTLYLQMNSLRDEDTALYYCVRGTSDWRGIDYWGQGTLVTVSS

SEQ ID NO: 24935 - protein, 97 aa, Homo sapiens; identical to SEQ ID NO: 24934

SEQ ID NO: 24936 - protein, 97 aa, Homo sapiens
EASGFTSSHYWMHWVRQGPGKGLVWVSRISDDRHTIDYADSVKGRFTISRDDAKNTLYLQMNSLRDEDTALYYCVRGTSDWRGIDYWGQGTLVTVSS

SEQ ID NO: 24937 - protein, 96 aa, Homo sapiens
EASGFTFSHYWMHWVRQGPGKGLVWVSRISDDRHTIDYADSVKGRFTISRDDAKNTLYLQMNSLRDEDTALYYCVRGTSDWRGIDYWGQEPWSPSP

SEQ ID NO: 24938 - protein, 97 aa, Homo sapiens
ISGDSVSADIGWNWIRQSPSRGLELLGRTYYQSKWITDYAVSVKGRITIDADTSKNQFSLQLNSVNPEDTAVYFCARGWLRTGFDPWGQGTLVTVSS

SEQ ID NO: 24939 - protein, 98 aa, Homo sapiens
ISGDSVSSNSAAWNWIRQSPSRGLEWLGRTYYMSKWYNDYAVSVKSRITINPDASKNQFSLQLNSVTPEDTAVYYCARGWLRTGFDPWGQGTLVTVSS

SEQ ID NO: 24940 - protein, 96 aa, Homo sapiens
AASGFTFSNFWMSWVRQAPGKGLEWVANIGEDGSETYYVDSVKGRFTMSRDNARKSLYLQMNSLRAEDTAVYYCARASSPGTTDYWGRGTLVTVSS

SEQ ID NO: 24941 - protein, 96 aa, Homo sapiens; identical to SEQ ID NO: 24940

SEQ ID NO: 24942 - protein, 96 aa, Homo sapiens
EASGFPFSYYWMSWVRQAPGQGLEWVANIKEDGSEKYYVDSVKGRFTISRDNAKNSLYLEVNSLSPEDTAVYYCARASSPGTTDYWGQGTLVTVSS

SEQ ID NO: 24943 - protein, 99 aa, Homo sapiens
ASGFTLTNYWMHWVRQAPGKGLVWVSRVNRDGTDTNYADSVKGRFTISRDNAKNTLYLQMNSLRAEDTAVYYCARDEGVATTLRGFDYWGQGTLVSVSS

SEQ ID NO: 24944 - protein, 100 aa, Homo sapiens
AATGFALRDYWMHWVRQVPGKGLVWVSRINGDGSNINYAESVKGRFTISRDNDKNTLYLLMNPLRAEDTAVYYCARDEGVATTLRGFDYWGRGTLVTVSS

SEQ ID NO: 24945 - protein, 99 aa, Homo sapiens
AASGFTFSNYALSWVRQAPGKGLEWVSGISGSGGSTYYADSVKGRFTISRDNSKNTLYLQMNSLRAEDTAVYYCAKVVVVTVYWYFDLWGRGTLVTVSS

SEQ ID NO: 24946 - protein, 99 aa, Homo sapiens
AASGFTFSNYAMSWVRQAPGKGLEWVSGISGSGGGTYYADSVKGRFTISRDNSKGTLYLQMNSLRAEDTAVYYCAKVVVVTVYWYFDLWGRGTLVTVSS

SEQ ID NO: 24947 - protein, 99 aa, Homo sapiens
AASGFTFSNYAMSWVRQAPGKGLEWVSGISGSGGSTYYADSVKGRFTISRDNSKNTLYLQMNSLRAEDTAVYYCAKVVVVTVYWYFDLWGRGTLVTVSS

SEQ ID NO: 24948 - protein, 99 aa, Homo sapiens
AASGFTFSNYPMSWVRQAPGKGLEWVSGISGSGGSTYYADSVKGRFTISRDNSKNTVYLQMKSLRAEDTAVYYCAKVVVVTVYWYFDLWGRGTLVTVSS

SEQ ID NO: 24949 - protein, 94 aa, Homo sapiens
AASGFTFSTYGMSWVRQAPGKGLEWVSGIVGSSGSTYYADSVKGRFTISRDNSKNTLYLQMNSLRAEDTAVYSCARGATGLDVWGQGTTVTVSS

SEQ ID NO: 24950 - protein, 94 aa, Homo sapiens
VASGFTFTNYGMTWVRQAPGKGLEWVSGIGAGGGSTYYADSVKGRLTISRDNSKNTLFLHMSSLRAEDTAVYFCARGATGLDVWGQGTTVTVFS

SEQ ID NO: 24951 - protein, 100 aa, Homo sapiens
AASGFTFDDYAMHWVRQAPGKGLEWVAVIWSDGSSKYYGDSVKGRFSISRDNSKNTLYLQMSSLRADDTAVYYCARDFLGEIPRWYFDFWGRGTVVTVSS

SEQ ID NO: 24952 - protein, 99 aa, Homo sapiens
ASGFIFSSYGMHWVRQAPGKGLEWVAVIWSDGSSKYYGDSVKGRFSISRDNSKNTLYLQMSSLRADDTAVYYCARDFLGEIPRWYFDFWGRGTVVTVSS

SEQ ID NO: 24953 - protein, 99 aa, Homo sapiens
ASGFIFSSYGMHWVRQAPGKGLEWVAVIWSDGSSKYYGDSVKGRFSISRDNSKNTLYLQMSSVRADDTAVYYCARDFLGEIPRWYFDFWGRGTVVTVSS

SEQ ID NO: 24954 - protein, 100 aa, Homo sapiens
AASGFIFSSYGMHWVRQAPGKGLEWVAVIWSDGSSKYYGDSVKGRFSISRDNSKNTLYLQMSSLRAEDTAVYYCARDFLGEIPRWYFDFWGRGTVVTVSS

SEQ ID NO: 24955 - protein, 100 aa, Homo sapiens
AASGFIFSSYGMHWVRQAPGKGLEWVAVIWSDGSSKYYGDSVKGRFSISRDNSKNTLYLQMSSLRAEDTAVYYCARDFLGEIPRWYFDFWGRGTVVAVSS

SEQ ID NO: 24956 - protein, 100 aa, Homo sapiens
AASGFIFSSYGMHWVRQVPGKGLEWVAVIWSDGSSKYYGDSVKGRFSISRDNSKNTLYLQMSSLRAEDTAVYYCARDFLGEIPRWYFDFWGRGTVVAVSS

SEQ ID NO: 24957 - protein, 100 aa, Homo sapiens; identical to SEQ ID NO: 24954

SEQ ID NO: 24958 - protein, 99 aa, Homo sapiens; identical to SEQ ID NO: 24952

SEQ ID NO: 24959 - protein, 100 aa, Homo sapiens
GASGFIFSSYGMHWVRQAPGKGLEWVAVIWSDGSSKYYGDSVKGRFSISRDNSKNTLYLQMSSLRAEDTAVYYCARDFLGEIPRWYFDFWGRGTVVTVSS

SEQ ID NO: 24960 - protein, 100 aa, Homo sapiens
ATSGFVFSSFGMHWFRQAPGKGPEWVACLWYDGSSKYYGDSVKGRFSISRDNSKNTLYLQMSSLRAEDTAVYYCARDFLGEIPRWYFDFWGRGTVVTVSS

SEQ ID NO: 24961 - protein, 98 aa, Homo sapiens
AIYGGSFNGIYWSWIRQPPGKGLEWIAEINPSRDRGNINYNPSLKSRVTISLDTAKNQFSLELSSVTAADTAVYYCAKSLYCGDDCPWGQGTLVTVSS

SEQ ID NO: 24962 - protein, 94 aa, Homo sapiens
VYGGSFSGYYWSWIRQSPGKGLEWIGEMKNGVSAQYNPSLESRVTMSLDTSRNQFSLKLTSVTAADTAVYYCAKSLYCGDDCPWGQGSLVTVSS

SEQ ID NO: 24963 - protein, 95 aa, Homo sapiens
AVYGGSFSGYYWSWIRQPPGKGLEWIGEMKHSGSTKYNPSLKSRVIMSLDTSKNQFSLRLSFVTAADTAVYYCAKSLYCGDDCPWGQGTLVTVSS

SEQ ID NO: 24964 - protein, 95 aa, Homo sapiens
AVYGASFSTYYWSWIRQPPGKGLEWIGEINHSGSTKYNPSLKSRVTMSLDASKNQFSLRLSSVTAADTAVYYCAKSLYCGDDCPWGQGTLVTVSS

SEQ ID NO: 24965 - protein, 95 aa, Homo sapiens
VDNAGSFNGFYWSWIRQPPGKGLEWIGERNPDGVTKFNPSLKSRVTISLDTSRNQFSLKLMSVTAADTAVYYCAKSLYCGDDCPWGQGTLVTVSS

SEQ ID NO: 24966 - protein, 104 aa, Homo sapiens
ASGFIFRDHYMDWVRQAPGKGLEWIARIRNKVNSYTTEYAASVKGRFTISRDDSQNSLNLQMDSLKAEDTALYYCVRGGGVTTGSHYYYGLDVWGQGTTVTVSS

SEQ ID NO: 24967 - protein, 105 aa, Homo sapiens
AASGFTFTDHYMDWVRQAPGKGLEWVARTRNKPNGYTTEYAASVKGRFTISRDDSKNSVYLQMTSLEAEDAAVYFCVRGGGVTTGSHYYYGLDVWGQGTTVTVSS

SEQ ID NO: 24968 - protein, 101 aa, Homo sapiens
ASGFTFSSYDMHWVRQVKGRGLEWVSATGTTGDTYYSDAVRGRFTISREDAKYSLYLQMNSLSAGDTAVYYCARDSTLGSGGGPDWYFDLWGRGTLVTVSS

SEQ ID NO: 24969 - protein, 102 aa, Homo sapiens
VASGFTFSSYDMHWVRQVKGRGLEWVSATGTTGDTYYSDSVRGRFTISREDAKYSLYLQMNSLRAGDTAVYYCARDSTLGSGGGPDWYFDLWGRGTLVTVSS

SEQ ID NO: 24970 - protein, 96 aa, Homo sapiens
ISGDSVSSNSATWNWIRQSPSRGLEWLGRTYYRSEWSNVYAISMKSRITINPDTSKNQFSLQLNSVTPEDTAVYYCARGAGPFDYWGQGTLVAVSS

SEQ ID NO: 24971 - protein, 96 aa, Homo sapiens
ISGDSVSSNSAAWNWIRQSPSRGLEWLGRTYYRSKWYNDYAVSVKSRITINPDTSKNQFSLQLNSVTPEDTAVYYCARGAGPFDYWGQGTLVTVSS

SEQ ID NO: 24972 - protein, 94 aa, Homo sapiens
AASGFSFSKYTMGWVRQAPGKGLEWVSAILSNGYDTFYGDSVKGRFTLSRDNSKNMVYLQMNGLRVDDTAVYYCARRVEWAFDSWGQGTLATVS

SEQ ID NO: 24973 - protein, 94 aa, Homo sapiens
EASGFNFRDYTMGWVRQAPGKGLEWVSAILSNRTTSYADSVKGRFTISRDTSRKTVFLQLNSLRLEDTALYYCARRVEWAFDSWGQGTLVTVSS

SEQ ID NO: 24974 - protein, 94 aa, Homo sapiens
EASGFSFSDYTMGWVRQAPGKGLEWVSAILSNGKTYYAESVKGRFTISRDNSKKTVFLQLNSLRLEDTALYYCARRVEWAFDSWGQGTLVTVSS

SEQ ID NO: 24975 - protein, 94 aa, Homo sapiens
EASGFPFSIYTMGWVRQAPGKGLEWVSAIISNGNKYYADSVKGRFTISRDNSKQTVLLQLNSLRPEDTALYYCARRVEWAFDSWGQGTLVTVSS

SEQ ID NO: 24976 - protein, 94 aa, Homo sapiens
EASGFTFSDYTMGWVRQAPGKGLEWVSAIISYGNTYYADSVKGRFTISRDNSKKTVLLQLNSLRPEDTALYYCARRVEWAFDSWGQGTLVTVSS

SEQ ID NO: 24977 - protein, 96 aa, Homo sapiens
AASGVTVHTASMFWVRQAPGKGLEWVSQLETDGKTMGYADSVKGRFTISRDIAKNTLYLQMNSLGAEDTAVYFCARGGVRYGFDLWGQGTMVTVSS

SEQ ID NO: 24978 - protein, 96 aa, Homo sapiens
AASGVTVHTTSMFWVRQAPGKGLEWVSQLETDGKTMGYADSVKGRFTISRDIAKNTLYLQMNSLGAEDTAVYFCARGGVRYGFDLWGQGTMVTVSS

SEQ ID NO: 24979 - protein, 96 aa, Homo sapiens
AASGVTFTTNSMFWVRQAPGKGLVWVSQLESDGKTVGYADSVKGRFTISRDIAKNTLYLQMNSLGAEDTAVYFCARGGVRYGFDLWGQGTMVTVSS

SEQ ID NO: 24980 - protein, 96 aa, Homo sapiens
AASGFTFSSYDMHWVRQAPGKGLEWVSQLETDGKTMGYADSVKGRFTISRDIAKNTLYLQMNSLGAEDTAVYFCARGGVRYGFDLWGQGTMVTVSS

SEQ ID NO: 24981 - protein, 96 aa, Homo sapiens
AASGVTVTTASMFWVRQAPGKGLVWVSQLESDGKTMGYADSVKGRFTISRDIAKNTLYLQMNSLGAEDTAVYFCARGGVRYGFDLWGQGTMVTVSS

SEQ ID NO: 24982 - protein, 96 aa, Homo sapiens
AASGFTFSTYWMHWVRQAPGKGLVWVSRINSDGYSTGYADSVKGRFTFSRDNAKNTLYLQMNSLRAEDTAVYFCARGGVRYGFDLWGQGTMVTVSS

SEQ ID NO: 24983 - protein, 90 aa, Homo sapiens
AASGFTFSDSWMSWVRQAPGKGLECVANIKPDGSVKSYVDSVKGRFTISRDNAKNSLYLEMNSLRVEDTAVYHCARDVIWGQGTTVTVSS

SEQ ID NO: 24984 - protein, 90 aa, Homo sapiens; identical to SEQ ID NO: 24983

SEQ ID NO: 24985 - protein, 90 aa, Homo sapiens
AASGFTFSDSWMSWVRQAPGKGLECVANIKPDGSVTSYVDSVKGRFTISRDNAKNSLYLEMNSLRAEDTAVYHCARDVIWGQGTTVTVSS

SEQ ID NO: 24986 - protein, 90 aa, Homo sapiens
AASGFTFSDSWMSWVRQAPGKGLECVANIKPDGSVKSYVDSVKGRFTISRDNAKNSLYLEMNSLRAEDTAVYHCARDVIWGQGTTVTVSS

SEQ ID NO: 24987 - protein, 89 aa, Homo sapiens
ASGFTFSDSWMSWVRQAPGKGLECVANIKPDGSVKSYVDSVKGRFTISRDNAKNSLYLEMNSLRVEDTAVYHCARDVIWGQGTTVTVSS

SEQ ID NO: 24988 - protein, 90 aa, Homo sapiens
AASGFTLSGYWMSWVRQAPGKGLEWVANIKEDGSEEYYADSVRGRFTISRDNAKNSLSLQMNSLRSEDTAVYYCARDVIWGQGTTVTVSS

SEQ ID NO: 24989 - protein, 99 aa, Homo sapiens
EASGFAFSNFPVNWIRQVPGRGLEWIAVIGGNRGGTFYADSVKGRFTMSRDDSKNMLFLQMDSLRVEDTAIYYCAKGGLSFAGDYFDSWGQGTLVTVSS

SEQ ID NO: 24990 - protein, 99 aa, Homo sapiens
EASGFAFSNFPVNWIRQVPGRGLEWIAVIGGNRGGTFYADSVKGRFTMSRDDSKKMLFLQMDSLRVEDTAIYYCAKGGLSFAGDYFDSWGQGTLVTVSS

SEQ ID NO: 24991 - protein, 101 aa, Homo sapiens
AASGFTLSSALMSWVRQSPVRGLEWIGRITDDARGGTTEYAGPMIGKVTISRDDSKNTLYLEMNSLKIEDTGVYYCTTAFPVYTSDSFDYWGRGTLVTVSS

SEQ ID NO: 24992 - protein, 101 aa, Homo sapiens
AASGFTLSSALMSWVRQSPVRGLEWIGRITEDARGGTTEYAGPMIGKVTILRDDSKNTLYLEMNSLKIEDTGVYYCTTAFPVYTSDSFDYWGRGTLVTVSS

SEQ ID NO: 24993 - protein, 101 aa, Homo sapiens
AASGFTLSSALMSWVRQSPVRGLEWIGRITDDARGGTTEYAGPMIGKVTISRDDSKNTLYLEINSLKIEDTGVYYCTTAFPVYTSDSFDYWGRGTLVTVSS

SEQ ID NO: 24994 - protein, 98 aa, Homo sapiens
AGSGFNLNKVLMSWVRQTPDKGLEWLGRILTSGSTEYAAPMKGRFTISRDDSRNTVFLEMNTLQTEDTGVYYCTTAFPVYTSDSFDYWGQGTLVTVAS

SEQ ID NO: 24995 - protein, 90 aa, Homo sapiens
AASGLTFNTYNIHWVRQTPGKGLEWVALIYYDGTRKYYADSVKGRFTISRDDSKNTLYLQMNSLRAEDTAVYFCGDFHYWGQGTLVTVSS

SEQ ID NO: 24996 - protein, 89 aa, Homo sapiens
ASESIFSSLNIHWVRQAPGKGLEWVALIYHDGNVKYYADSVKGRFTVSRDNFKNTLYLQMNGLRDEDTAVYYCGDFHYWGQGTLVTVSS

SEQ ID NO: 24997 - protein, 90 aa, Homo sapiens
AASGLTFSNYNIHWVRQTPGKGLEWVALIWYDGSNKYYADSVKGRFTISRDNSKNTMYLQMNSLRAEDTAVYYCGDFHYWGQGTLVTVSS

SEQ ID NO: 24998 - protein, 90 aa, Homo sapiens
AASGLTFSNYNIHWVRQTPGKGLEWVALIWYDGSNKYYADSVKGRFTISRDNSKNTLYLQMNSLRAEDTAVYYCGDFHYWGQGTLVTVSS

SEQ ID NO: 24999 - protein, 95 aa, Homo sapiens
AASGYTFSSYWMHWVRQVPGKGMVWVSRINEYGSITNYADSVKGRFTISRDNAKNTLYLQMNSLRAEDTGVYYCTRDIGGRYAYWGRGTLVTVSS

SEQ ID NO: 25000 - protein, 95 aa, Homo sapiens
AASGYTFTNYWMHWVRQVPGKGMVWVSRINEDGRITNYADSVKGRFTISRDNPRNTLYLHMNSLRAEDSGVYYCTRDIGGRYAYWGQGTLVTVSS

SEQ ID NO: 25001 - protein, 95 aa, Homo sapiens
AASGYIFSSMWMHWVRQVPGKGLVWVSRINTDGSVINYADSVRGRFTISRDNAKNTLYLQMNDLRAEDTAVYYCTRDIGGRYAYWGQGTLVTVSS

SEQ ID NO: 25002 - protein, 98 aa, Homo sapiens
ASGFTFSDHYMDWLRQAPGKGLEWVGRNRDKAHSYTKEYAASVKGRFTISRDDSKNSLYLQMNSLKSEDTAVYYCARVVARDGYSFDSWGQGTLVSVS

SEQ ID NO: 25003 - protein, 99 aa, Homo sapiens
VASGFTFSDHYMDWLRQVPGKGLEWVGRNRDKAHSYTKEYAASVKGRFTISRDDSKNSLYLQMNSLKTEDTAVYYCARVVARDGYSFDSWGQGTLVTVS

SEQ ID NO: 25004 - protein, 98 aa, Homo sapiens
ASGFSFSDHYMDWLRQAPGKGLEWVGRNRDKAHSYTKEYAASVKGRFTISRDDSKNSLYLQMNSLKSEDTAVYYCARVVARDGYSFDSWGQGTLVSVS

SEQ ID NO: 25005 - protein, 98 aa, Homo sapiens
ASGFSFSDHYMDWLRQAPGKGLEWVGRNRDKAHSYTKEYAASVKGRFTISRDDSKNSLYLQMNSLKTEDTAVYYCARVVARDGYSFDSWGQGTLVTVS

SEQ ID NO: 25006 - protein, 98 aa, Homo sapiens
ASGFSFSDHYMDWLRQVPGKGLEWVGRNRDKAHSYTKEYAASVKGRFTISRDDSKNSLYLQMNSLKTEDTALYYCARVVARDGYSFDSWGQGTLVTVS

SEQ ID NO: 25007 - protein, 99 aa, Homo sapiens
VASGFSFSDHYMDWLRQVPGKGLEWVGRNRDKAHSYTKEYAASVKGRFTISRDDSKNSLYLQMNSLKTEDTAVYYCARVVARDGYSFDSWGQGTLVTVS

SEQ ID NO: 25008 - protein, 98 aa, Homo sapiens
ASGFSFSDHYMDWLRQAPGKGLEWVGRNRDKAHRYTKEYAASVKGRFTISRDDSKNSLYLQMNSLKTEDTAVYYCARVVARDGYSFDSWGQGTLVTVS

SEQ ID NO: 25009 - protein, 98 aa, Homo sapiens; identical to SEQ ID NO: 25002

SEQ ID NO: 25010 - protein, 100 aa, Homo sapiens
AASGFTFSDHYMDWVRQAPGKGLEWVGRTRDKGHSYTTEYAASVKGRFTISRDDSKNSLYLQMNSLKTEDTAVYYCARVVARDGYSFDSWGQGSLVTVSS

SEQ ID NO: 25011 - protein, 92 aa, Homo sapiens
ASGFIFSNYAMYWVRQAPGKGLEWVSAISGSTYYADSVKGRFTIFRDNSKNTVYLQMDSLRGEDTAVYYCAKLVGRNTEDFWGQGTLVTVSS

SEQ ID NO: 25012 - protein, 92 aa, Homo sapiens; identical to SEQ ID NO: 25011

SEQ ID NO: 25013 - protein, 92 aa, Homo sapiens; identical to SEQ ID NO: 25011

SEQ ID NO: 25014 - protein, 96 aa, Homo sapiens
GASGLTFSMYAVDWVRQAPGKGLEWISGISGSGGNTYYADSVKGRFTISRDNSRNTVYLQMNSLRAEDTAVYYCAKLVGRNTEDFWGQGTLVTVSS

SEQ ID NO: 25015 - protein, 97 aa, Homo sapiens
AASGFNFRKYAMGWVRQAPGTGLEWVSAISISGSSTFYADSVKGRFTISRDRSENTLYLQMNSLRVEDTAVYYCAKRLAEGGHFDYWGQGALVTVSS

SEQ ID NO: 25016 - protein, 97 aa, Homo sapiens; identical to SEQ ID NO: 25015

SEQ ID NO: 25017 - protein, 97 aa, Homo sapiens
AASGFTFSTYAMGWVRQAPGTGLEWVSAISISGSSTFYADSVKGRFTISRDSSKSTLYLQMNSLRADDTAVYYCAKRLAEGGHFDYWGQGTLVTVSS

SEQ ID NO: 25018 - protein, 97 aa, Homo sapiens; identical to SEQ ID NO: 25015

SEQ ID NO: 25019 - protein, 97 aa, Homo sapiens
AASGFNFRKYAMGWARQAPGTGLEWVSAISISGSSTFYADSVKGRFTISRDRSENTLYLQMNSLRVEDTAVYYCAKRLAEGGHFDYWGQGALVTVSS

SEQ ID NO: 25020 - protein, 97 aa, Homo sapiens
AASGFTFSSYAMSWVRQAPGKGLEWVSAISISGASTFYADSVKGRFTISRDKSKNTLYLQMNNLRAEDTAIYFCAKRLAEGGHFDYWGQGTLVTVSS

SEQ ID NO: 25021 - protein, 98 aa, Homo sapiens
AASGFTFRKYAMGWVRQAPGKGLEWVSAISISGSSTFYAADSVKGRFTISRDNSKNTLYLQMSNLRAEDTAIYFCAKRLAEGGHFDYWGQGTLVTVSS

SEQ ID NO: 25022 - protein, 102 aa, Homo sapiens
EASGFIFSSYVMTWVRQAPGKGLEWVSLVARNNDETYYADSVKGRFTISRDNSKNTLYLQMHSLRAEDTAVYSCAKGRYYGSGSYLNSFDSWGHGTLVTVSS

SEQ ID NO: 25023 - protein, 102 aa, Homo sapiens; identical to SEQ ID NO: 25022

SEQ ID NO: 25024 - protein, 100 aa, Homo sapiens
VASGFTFSSYVMTWVRQAPGKGLEWVSLISGSNTYYADSVKGRFTISTDYSKNTLYLQMDSLRGEDTGIYYCAKGRYYGSGSYLNSFDSWGQGTLVTVSS

SEQ ID NO: 25025 - protein, 94 aa, Homo sapiens
AVSGFTFSNYWMRWVRQAPGKGLEWVANIKEDGSEKNYVDSVKGRFTISRDNAKNSLYLQMNSLRAEDTAVYYCASGLTVAYYWGQGTLVTVSS

SEQ ID NO: 25026 - protein, 94 aa, Homo sapiens; identical to SEQ ID NO: 25025

SEQ ID NO: 25027 - protein, 94 aa, Homo sapiens
AVSGFRFSSYWMSWVRQAPGKGLEWVANIKEDGGENHYVDSVKGRFTISRDNAKNSLFLQMNSLRDEDTAVYYCASGLTVAYYWGQGTLVTVSS

SEQ ID NO: 25028 - protein, 92 aa, Homo sapiens
ASGYTFTSDLISWVRQAPGEGLEWIGWVATQNHNTYYTENFQGRITMTTDTSTSTAYMELRSLRSDDTAVYYCTRGHIKDYWGQGTLVTVSS

SEQ ID NO: 25029 - protein, 92 aa, Homo sapiens
ASGYTFTSDGITWVRQAPGQGLEWMGWIITYNGNTEYAQKFQGRVTMTTDTSTSTVYMELRSLRSDDTAVYYCTRGHIKDYWGQGTLVTVSS

SEQ ID NO: 25030 - protein, 98 aa, Homo sapiens
ASGYTFTTYGISWVRQAPGQGPEWMGWISTYSGDTEYAQKFQGRVTMTTDTSASTVYMELRSLRSDDTALYYCARDSCSGGSCYVDYWGQGTLVTVSS

SEQ ID NO: 25031 - protein, 98 aa, Homo sapiens
ASGYTFTSYGISWVRQAPGQGLEWMGWISAYNGNTKYAQKLQGRVTMTTDTSTSTAYMELRSLRSDDTAVYYCARDSCSGGSCYVDYWGQGTLVTVSS

SEQ ID NO: 25032 - protein, 91 aa, Homo sapiens
AASGFTFSSFWMNWVRQAPGKGLEWVANIKQDGSQKVYMDSVKGRFTISRDNAENSLYLQMNSLRPEDTAVYYCVRGTDVWGQGTTVRVSS

SEQ ID NO: 25033 - protein, 90 aa, Homo sapiens
ASGFIFSSKWMNWVRQAPGKGLEWVANINQDGSEKKYVDSVKGRFTISRDNAKNSLFLQMNNLRVDDTAVYYCVRGTDVWGKGTTVTVSS

SEQ ID NO: 25034 - protein, 98 aa, Homo sapiens
AASGFTFSSYAMSWVRQAPGEGLEWVSFFYSGGSSTYYADSVKGRFTISRDNSKNTLYLQMNSLRAEDTAVYYCAKGYSAYDLYFDYWGQGTLVTVSS

SEQ ID NO: 25035 - protein, 98 aa, Homo sapiens
AASGFIFSSYVMSWVRQAPGKGLEWVSAISGSGITTYHADSVKGRFTISRDNSKNTLNLQMNSLGAEDTAVYYCAKGYSAYDLYFDYWGQGALVTVSS

SEQ ID NO: 25036 - protein, 91 aa, Homo sapiens
AASGFPFQTYWMNWVRRAPGKGLEWVANIKPDGSAAFYAGSVKGRFSISRDNFRNSVHLQMNSLRVEDTAVYYCARAMHVWGQGARVTVSS

SEQ ID NO: 25037 - protein, 91 aa, Homo sapiens
AASGFTFSDYWTNWVRQAPGKGLEWVANINEDGSKKYYVGSVRGRFTIYRDNTQNSVFLQMNSLRVEDTAVYYCARAMHVWGQGTTVSVFS

SEQ ID NO: 25038 - protein, 99 aa, Homo sapiens
VASGFTFINHAMAWVRQAPGKGLEWVSSINGRGDTTFYTDSVRGRFTISRDTSKNTLFLEINNLRAEDAALYFCAKYYLSGSYYHFDSWGQGTLVTVSS

SEQ ID NO: 25039 - protein, 99 aa, Homo sapiens
AASGFPFINYAMAWVRQAPGKGLEWVSSISGDGRTPFYADSVRGRFIISRDTSEGTLFLQMNSLRVEDTAVYYCAKYYLSGSYYHFDSWGRGNLVTVSS

SEQ ID NO: 25040 - protein, 94 aa, Homo sapiens
EASGFRFNVYTMGWVRQAPGKGLMWVSAILSNGVPEYPDSMKGRFTVSRDNSNSMLYLRIDSLTADDTAKYYCARRVEGRFDYWGQGALVAVSS

SEQ ID NO: 25041 - protein, 94 aa, Homo sapiens
AASGFTFNTYTMGWVRQAPGKGLEWVSAILSNGDTYYPDSVKGLFTISRDNSRSTLYLRMNSLRVEDTAVYYCARRVEGRFDYWGQGSLVTVSS

SEQ ID NO: 25042 - protein, 95 aa, Homo sapiens
AASGFSFSTYTMGWVRKAPAKGLEWVSAILNGGTSTFYGDSVKGRFTISRDNSKNTLYLQMSSLRAEDTAVYYCARRVEGRFDYWGQGTLVTVSS

SEQ ID NO: 25043 - protein, 93 aa, Homo sapiens
AASGFTFSTYDMTWVRQAPGRGLECVAVIYGGDGSTEYADSVKGRFTISRDNSRNTLFLQMNSLRVEDTALYYCAKGSACDYWGQGTLVTVSS

SEQ ID NO: 25044 - protein, 93 aa, Homo sapiens; identical to SEQ ID NO: 25043

SEQ ID NO: 25045 - protein, 93 aa, Homo sapiens
AASGFTFSTYDMSWVRQAPGKGLEWVSVIYRDGRSTQYADSVRGRFIISRDNSKNTLYLQMNSLRAEDTAVYYCAKGSACDYWGQGTLVTVSS

SEQ ID NO: 25046 - protein, 93 aa, Homo sapiens
AASGFTFSSYDMSWVRQAPGKGLEWVSVIYSGGRSTYYADSVKGRFIISRDNSKNTLYLQMNSLRAEDTAVYYCAKGSACDYWGQGTLVTVSS

SEQ ID NO: 25047 - protein, 93 aa, Homo sapiens
AASGFPFSSYDMSWVRQAPGKGLEWVSVIYGGSGSTYYADSVKGRFIISRDNSKNTLYLQMNSLRAEDTAVYYCAKGSACDYWGQGTLVTVSS

SEQ ID NO: 25048 - protein, 94 aa, Homo sapiens
AVSGFTLSNYWIHWVRQAPGKGLVWVSRISKDGTVTNYADSVKGRFTISRDNAKNTVYLQMNSLRAEDTAVYYCVRDLRIYDFWGQGTLVTVSS

SEQ ID NO: 25049 - protein, 94 aa, Homo sapiens
AASGFTISTYWMHWVRQAPGKGLVWVSRINGDGSSTNYADSVKGRFTISRDNAKNTVFLQMNSLRDDDTAVYYCVRDLRIYDFWGQGTLVTVSS

SEQ ID NO: 25050 - protein, 94 aa, Homo sapiens; identical to SEQ ID NO: 25049

SEQ ID NO: 25051 - protein, 94 aa, Homo sapiens
AASGFTISSYWIHWVRQAPGKGLVWVSRINGDGSSTSYADSVKGRFTISRDNAKNTVFLQMNSLRDDDTAVYYCVRDLRIYDFWGQGTLVTVSS

SEQ ID NO: 25052 - protein, 94 aa, Homo sapiens; identical to SEQ ID NO: 25049

SEQ ID NO: 25053 - protein, 92 aa, Homo sapiens
AASGFTFSNYVMSWVRHTPGKGLKWVSTISDSGGSTYYADSVRGRFTISRDNSKNTLYLQMNSLRAEDTAVYYCAKGWFDYWGQGTLVTVSS

SEQ ID NO: 25054 - protein, 90 aa, Homo sapiens
AASGFTFSNYAMTWARQAPGKGLEWVSTISGRGTYYADSVKGRFTISRDNSKNTLYLQMNSLRAEDTAVYYCAKGWFDYWGQGTLVTVSS

SEQ ID NO: 25055 - protein, 96 aa, Homo sapiens
AASGFTFSSYAMSWVRQAPGKGLEWVSIIYSGGSRTYYADSVKGRFTISRDHSKNTLYLQMNSLRAEDTAVYYCAKGIAVAAFDYWGQGTLVTVSS

SEQ ID NO: 25056 - protein, 96 aa, Homo sapiens
AASGFTFNNYAMSWVRQAPGKGLEWVSVIYSGGRSTYYADSVKGRFTISRDNSKNILYLQMNSLRAEDTAVYYCAKGIAVAAFDYWGQGILVTVSS

SEQ ID NO: 25057 - protein, 96 aa, Homo sapiens
AASGFTFSSYAMSWVRQAPGKGLEWVSVIYSGGRSTYYADSVKGRFTISRDNSKNTLYLQMNSLRADDTAVYYCAKGIAVAAFDYWGQGTLVTVSS

SEQ ID NO: 25058 - protein, 96 aa, Homo sapiens; identical to SEQ ID NO: 25057

SEQ ID NO: 25059 - protein, 96 aa, Homo sapiens
AASGFTFNNYAMSWVRQAPGKGLEWVSVIYSGGRSTYYADFVKGRFTISRDNSRNTVYLQMNSLRAEDTALYYCAKGIAVAAFDYWGQGTLVTVSS

SEQ ID NO: 25060 - protein, 96 aa, Homo sapiens; identical to SEQ ID NO: 25057

SEQ ID NO: 25061 - protein, 99 aa, Homo sapiens
ASGYTFTSYYMHWVRQAPGQGLEWMGIINPNSGSTTYAQKFQGRVIMTRDTSTSTVYMQLSSLRSEDTAVYYCARGLGIAAAGTLPDYWGQGTLVTVSS

SEQ ID NO: 25062 - protein, 99 aa, Homo sapiens
ASGYTFTSYYMHWVRQAPGQGLEWMGIINPSGGSTSYAQKFQGRVTMTRDTSTSTIYMELSSLRSEDTAVYYCARGLGIAAAGTLPDYWGQGTLVTVSS

SEQ ID NO: 25063 - protein, 100 aa, Homo sapiens
KGSGYSFTSYWIGWVRQMPGKGLDWMGIIYPSDSDTRYSPSFQGQVTISADKSINTAYLQWNSLKASDTAMYYCARFGGTSGWYSGFDYWGQGTLVTVSS

SEQ ID NO: 25064 - protein, 100 aa, Homo sapiens
KGSGYSFTNYWIGWVRQMPGKGLEWMGIIYPSDSDTRYSPSFQGQVTISADKSLNSAYLQWSSLKASDTAMYFCARFGGTSGWYSGFDYWGQGTLVTVSS

SEQ ID NO: 25065 - protein, 100 aa, Homo sapiens
KGSGYSFTNYWIGWVRQMPGKGLEWMGIIYPSDSDTRYSPSFQGQVTISADKSINSAYLQWNSLKASDTAMYFCARFGGTSGWYSGFDYWGQGTLVTVSS

SEQ ID NO: 25066 - protein, 100 aa, Homo sapiens; identical to SEQ ID NO: 25064

SEQ ID NO: 25067 - protein, 92 aa, Homo sapiens
AASGFTFSTYDMHWVRQTTGKGLEWVSGIATAGDTYYSGSVKGRFTISRENAKNSLYLQMNSLRAGDTAVYYCARGNGWGVWGQGTTVTVSS

SEQ ID NO: 25068 - protein, 92 aa, Homo sapiens
AASGFTFSSYDMHWVRQVTGKGLEWVSAITTAGDTYYPGSVKGRFTISRENAKNSLYLQMNSLRAGDTAVYYCARGNGWGVWGQGTTVTVSS

SEQ ID NO: 25069 - protein, 100 aa, Homo sapiens
TTSGFTFGDYAMSWVRQAPGKGLEWVGFMRSKAYGGTTEYAASVKGRFTISRDDSKSIAYLQMNSLKTEDTAVYYCSRDRGYSYGYGDYWGQGTLVTVSS

SEQ ID NO: 25070 - protein, 100 aa, Homo sapiens
TASGFTFGDYAMSWVRQAPGKGLEWVGFIRSNAYGGTTEYAASVKGRFTISRDDSKSIAYLQMNSLKTEDTAVYYCSRDRGYSYGYGDYWGQGTLVTVSS

SEQ ID NO: 25071 - protein, 100 aa, Homo sapiens
TTSGFTFGDYALSWVRQAPGKGLQWVGFIRSKAYGGTTEYAAAVKGRFTISRDDSKSIAYLQMNSLETEDTAVYYCSRDRGYSYGYGDYWGQGTLVTVSS

SEQ ID NO: 25072 - protein, 100 aa, Homo sapiens
TSSGFTFGDYAMSWVRQAPGKGLEWVGFIRSKPYGGSTDYAASVKGRFTISRDDSKSIAYLQMNSLKTEDTAVYYCSRDRGYSYGYGDYWGQGTLVTVSS

SEQ ID NO: 25073 - protein, 93 aa, Homo sapiens
AASGFTFSRYWMTWVRQAPGKGLEWVANIKEDGSEKNYVGSVKGRFTISRDNARNSLYLQMNSLRAEETAVYFCASGSGGHHYWGQGTLVTVS

SEQ ID NO: 25074 - protein, 94 aa, Homo sapiens
VASGFTFSRYWMTWVRQAPGKGLEWVANIKEDGSEKNYVDSVRGRFTISRDNDKNSLFLQMNSLRAEDTAVYYCASGSGGHHYWGQGTLVTVSS

SEQ ID NO: 25075 - protein, 94 aa, Homo sapiens
AASRFSFSNYWMSWVRQAPGKGLEWVANIKEDGSEKNYVDSVKGRFTISRDNAKNSLYLQMNSLRVEDTAVYYCASGSGGHHYWGQGTLVTVSS

SEQ ID NO: 25076 - protein, 96 aa, Homo sapiens
TTSGFTFGDYNMSWVRQAPGKGLEWLGFIRRKASGGTTEYAASVKGRFTISRDDSKGIAYLQMNSLKTEDTAVYSCTRGDGWYYYWGQGTLVTVSS

SEQ ID NO: 25077 - protein, 96 aa, Homo sapiens
TASGFTFGGYAMSWVRQAPGKGLEWVGLIRNKAYGGTTEYAASVKGRFTISRDDSKSIAYLQMNSLKTEDTAVYYCTRGDGWYYYWGQGTLVTVSS

SEQ ID NO: 25078 - protein, 102 aa, Homo sapiens
AASGFTFSSYWMSWVRQAPGKGLEWVANIKQDGSETFYVDSVKGRFNISRDNAKNSLYLQMNSLRAEDTAVYYCARKLYYYDTSELGWFDPWGQGTLVTVSS

SEQ ID NO: 25079 - protein, 102 aa, Homo sapiens
AASGFTFSNSWMSWVRQAPGKGLEWVATIKQDGSEKYYVDSVKGRFTISRDNPKNSLYLQMNSLRAEDTAVYYCARKLYYYDTSELGWFDPWGQGTLVTVSS

SEQ ID NO: 25080 - protein, 92 aa, Homo sapiens
GASGLSLSTYWMTWVRQAPGKGLEWVATITGDGSEKFYVDSVKGRFTISRDDANNLVYLQMNSLTAEDTALYYCVRDPVDHWGQGTPVTVSS

SEQ ID NO: 25081 - protein, 92 aa, Homo sapiens
AASGFTFSNYWMSWVRQAPGKGLEWVATLKQGGTEKFYVDSVKGRFTISRDNAKNSVYLQMDSLRAEDTALYYCVRDPVDHWGQGTLVTVSS

SEQ ID NO: 25082 - protein, 97 aa, Homo sapiens
ASGFTFSSYTMSWVRQAPGKGLEWVSAISGGGGSTYYADSVKGRFTISRDNSKNTLYLQMNSLRAEDTAVYYCAKGRGSGSYAPDYWGQGTLVTVSS

SEQ ID NO: 25083 - protein, 97 aa, Homo sapiens
AASGFTLSSYAMTWVRQAPGKGLEWVSSLSGSGSTSYADSVKGRFTISRDTSKNTLYLQMNSLRAADTALYFCAKGRGSGSYAPDYWGQGTLVTVSS

SEQ ID NO: 25084 - protein, 94 aa, Homo sapiens
VSGDSTSQYYWSWIREPAGKGLEWIGRIHSSGTTAYNPSLTSRLTVSLDTSKNQLSLKLTSVTAADTAMYYCARDPFRSGFDYWGQGALVTVSS

SEQ ID NO: 25085 - protein, 95 aa, Homo sapiens
TVSGASISTYYWNWIRQPAGKGLEWIGRIHPSVGTRYNPSLKSRVTMSVDTSKNQFSLNLTSVTAADTAVYYCARDPFRSGFDYWGQGTLVTVSS

SEQ ID NO: 25086 - protein, 100 aa, Homo sapiens
TVSGGSISSYYWSWIRQPPGKGLEWIGFIYYSGSTSYNPSVKSRVTISVDTSKNQFSLKLTSVSAADTAVYYCGRTHYDILTAHWNHDYWGQGTLVTVSS

SEQ ID NO: 25087 - protein, 100 aa, Homo sapiens
TVSGGSISSYYWSWIRQPPGKGLEWIGFIYYSGSTSYNPSVKSRVTISVDTSKNQFSLKLTSVSTADTAVYYCGRTHYDILTAHWNHDYWGQGTLVTVSS

SEQ ID NO: 25088 - protein, 100 aa, Homo sapiens
AVYGGSFSGYYWSWIRQPPGKGLEWIGQISHSGSTNYNPSLKSRVTISVDTSRNQFSLKMTSVTAADTAVYYCAGAVVVTAMAYWYFDLWGRGTLVTVSS

SEQ ID NO: 25089 - protein, 100 aa, Homo sapiens; identical to SEQ ID NO: 25088

SEQ ID NO: 25090 - protein, 100 aa, Homo sapiens
AVYGGSFSGYYWTWIRQPPGKGLEWIGEINHSGSTNYNPSLKSRVTVSVDTSKNQFSLKLTSVTAADTAVYYCAGAVVVTAMAYWYFDLWGRGTLVTVSS

SEQ ID NO: 25091 - protein, 100 aa, Homo sapiens; identical to SEQ ID NO: 25090

SEQ ID NO: 25092 - protein, 100 aa, Homo sapiens; identical to SEQ ID NO: 25088

SEQ ID NO: 25093 - protein, 91 aa, Homo sapiens
AASGFTFSSYAMSWVRQAPGKGLEWVSVIYSGGSTTYYADSVKGRFTISRDDSKNTLYLQMNSLRAEDTAVYYCVKDNDYWGQGTLVTVSS

SEQ ID NO: 25094 - protein, 91 aa, Homo sapiens
AASGFTFSSNAMSWVRQAPGKGLEWISVVYSGGSSTYYADSVKGRFTISRDDSKNTLYLQMNSLRGEDTAVYHCVKDNDYWGQGTLVTVSS

SEQ ID NO: 25095 - protein, 97 aa, Homo sapiens
ISGDSVSSNSATWNWIRQSPSRGLEWLGRTYYRSKWYNDHIVSVNSRITINPDTSKNQFSLQLNSVTPDDTAIYYCVRYSSGRFDYWGQGTLVTVSS

SEQ ID NO: 25096 - protein, 97 aa, Homo sapiens
ISGDSVSSNSATWNWIRQFPSRGLEWLGRTYYRSKWYNDHIVSVNSRITINPDTSKNQFSLQLNSVTPDDTAIYYCVRYSSGRFDYWGQGTLVTVSS

SEQ ID NO: 25097 - protein, 97 aa, Homo sapiens
ISGDSVSSNSATWNWIRQSPSRGLEWLGRTYYRSKWSDDYAVSVKSRINISPDTSKNEVSLLLRSVTAEDTAVYYCVRYSSGRFDYWGQGTLVTVSS

SEQ ID NO: 25098 - protein, 97 aa, Homo sapiens
ISGNSVSSNSAAWNWIRQSPSRGLEWLGRTYYRSKWSDDYAVSVKSRININPDTSKNEVSLLLKSVTAEDTAVYYCVRYSSGRFDYWGQGTLVTVSS

SEQ ID NO: 25099 - protein, 91 aa, Homo sapiens
AASGFTVQSTFMNWVRQAPGKGLEWVSLISAAGTIHYVDSVKGRFTISRDNSKNTIYLEINSLRVDDTAVYYCARGDMAVWGQGTTVTVSS

SEQ ID NO: 25100 - protein, 91 aa, Homo sapiens
AASGFTVQSTFMNWVRQAPGKGLEWVSLISAAGTVHYVDSVKGRFTISRDNSKNTVYLEINSLRVDDTAVYYCARGDMAVWGQGTTVTVSS

SEQ ID NO: 25101 - protein, 91 aa, Homo sapiens
AASGFTVRSTFMNWVRQAPGKGLEWVSLINSGGSGYYVDSVKGRFTISRDNSKNTVYLEINSLRVDDTAVYYCARGDMAVWGQGTTVIVSS

SEQ ID NO: 25102 - protein, 91 aa, Homo sapiens
AASGFAVNSDFISWVRQAPGKGLEWVSLISTAGTPYYADSVKGRFTISRDNAKNSLFLQMNGLRAEDTAVYYCARGDMAVWGQGTTVIVSS

SEQ ID NO: 25103 - protein, 91 aa, Homo sapiens
AASGFAVNSDFISWVRRAPGKGLEWVSLISTAGTPYYADSVKGRFTISRDNAKNSLFLQMNGLRAEDTAVYYCARGDMAVWGQGTTVIVSS

SEQ ID NO: 25104 - protein, 91 aa, Homo sapiens
AASGFAVNSDFISWVRQAPGKGLEWVSLISTAGTPYYADSVKGRFTISRDNAKNSLFLQMNGLRAEDTAEYYCARGDMAVWGQGTTVIVSS

SEQ ID NO: 25105 - protein, 97 aa, Homo sapiens
AASGFTLNNYWIHWVRQAPGKGLVWVSRISDDEWTTNYADSVRGRFTISRDKAKNTVYLQMNSLRDEDTAMYYCVRGSSDWTGIDYWGQGILVTVSS

SEQ ID NO: 25106 - protein, 97 aa, Homo sapiens
AASGFTFSTYWMHWVRQAPGMGLVWVSRMTPDGSYTNYADSVKGRFTISRDNTKNTLYLQMNSLRAEDTAVYYCVRGSSDWTGIDYWGQGILITVSS

SEQ ID NO: 25107 - protein, 92 aa, Homo sapiens
ASGFTFSTYAMSWVRQAPGKGLECVSVIYSDGRSPNYIDSVKGRFTISRDNSKNTVYLQLNSLRVEDTAVYYCTKGGHADYWGQGTLVTVSS

SEQ ID NO: 25108 - protein, 93 aa, Homo sapiens
AVSGFPFSSHEMSWVRQAPGKGLEYVSVISSDGSNTYYVDSVKGQFTISRDNSKNTLYLQMNSLRAEDTAVYYCTKGGHADYWGQGTLVTVSS

SEQ ID NO: 25109 - protein, 93 aa, Homo sapiens
AVSGFPFSSYEMSWVRQAPGKGLEYVSVISSDGSNTYYVDSVKGQFTISRDNSKNTLYLQMNSLRAEDTAVYYCTKGGHADYWGQGTLVTVSS

SEQ ID NO: 25110 - protein, 95 aa, Homo sapiens
AASGFTFSSYAMSWVRQAPGKGLECVSVIYADGTRTYYADSVRGQFTISRDNSKNTLYLQMNSLRAEDTAIYYCAKGGSRYFQHWGQGTLVTVSS

SEQ ID NO: 25111 - protein, 95 aa, Homo sapiens
AASGFTFSSSAMSWVRQAPGKGLEWVSVIYGGGSSTYYADSVKGRFTISRDNPKNTLYLQMNSLRAEDTAVYYCAKGGSRYFQHWGQGTLVTVSS

SEQ ID NO: 25112 - protein, 92 aa, Homo sapiens
AASGFTFFSYWMHWVRQAPGKGLVWVSRMNGDGSLTTYADSVKGRFTISRDNAKNTLYLQMNSLRAEDTAIYYCVRGLGDKWGQGTLVTVSS

SEQ ID NO: 25113 - protein, 92 aa, Homo sapiens
AVFGFTFSDYWMYWVRQVPGKGLVWLSRINSDGSLIAYADSVKGRFTISRDNAKNTLFLQMNSLSGDDTAIYYCVRGLGDKWGQGTLVTVSS

SEQ ID NO: 25114 - protein, 92 aa, Homo sapiens
AVSGFTFSDYWMYWVRQVPGKGLVWLSRINSDGSLIAYADSVKGRFTISRDNAKNTLFLQMNSLSGDDTAIYYCVRGLGDKWGQGTLVTVSS

SEQ ID NO: 25115 - protein, 101 aa, Homo sapiens
AASGFTFSNAWMNWVRQAPGKGLEWIGHIESKSDGGSTDYAAPVKGRFTISRDDSQNTVFLQMNSLKIEDSAIYYCATAPGFYSSAPFDYWGQGTLVTVSS

SEQ ID NO: 25116 - protein, 101 aa, Homo sapiens
AASGFTFTNAWMNWVRQAPGKGLQWVGHIKSETDGGTTDYAAPMKGRFTISRDDSKNTLYLQMNSLTAEDAAVYYCATAPGFYSSAPFDYWGPGTLVTVSS

SEQ ID NO: 25117 - protein, 94 aa, Homo sapiens
AAPGFTFSNYAMNWVRQAPGKGLEWVSGISGNAANTYYTDSVKGRFTISRDNSKNTLYLQMNSLRDEDTAVYYCAKGGYYFADWGQGTLVTVSS

SEQ ID NO: 25118 - protein, 94 aa, Homo sapiens; identical to SEQ ID NO: 25117

SEQ ID NO: 25119 - protein, 93 aa, Homo sapiens
ASGFTFSSYPMNWVRQAPGKGPGWVSGISDSGSDTYYADSVKGRFTISRDNSKNTVYLQMNSLRAEDTAVYSCAKGGYYFADWGQGTLVTVSS

SEQ ID NO: 25120 - protein, 90 aa, Homo sapiens
FDNYALHWIRQPPGKGPEWVSGIYWNGARRDYADSVKGRFTISKDDAKNSLYLQMNSLRPEDTALYYCVKDLEPGGADVWGQGTTVTVSS

SEQ ID NO: 25121 - protein, 96 aa, Homo sapiens
AVFGSTSTDYGMHWVRQAPGKGLEWVAGIIWNSGRIGYADSVKGRFTISGANALTSLYLQMNSLRPDDTALYFCVKDLEPGGADVWGPGTTVTVSS

SEQ ID NO: 25122 - protein, 94 aa, Homo sapiens
SGYTFTSYDINWVRQTSGQGFEWMGWMNPNNGNTGYAQKFQGRVTMTRDTSIRTAYMELTSLTSEDTAVYYCARSPREWGFDFWGQGTLVTVSS

SEQ ID NO: 25123 - protein, 94 aa, Homo sapiens; identical to SEQ ID NO: 25122

SEQ ID NO: 25124 - protein, 94 aa, Homo sapiens; identical to SEQ ID NO: 25122

SEQ ID NO: 25125 - protein, 93 aa, Homo sapiens
AASGFTFSSSWMTWVRQAPGKGLEWVANIKEDGGDKSYVDSVKGRFTISRDNAKNSLYLQMNGLRVEDTAVYYCVRFVSLGYWGQGTLVTVSS

SEQ ID NO: 25126 - protein, 93 aa, Homo sapiens
AASGFVFGSYAMHWVRQAPGKGLEWVANINQDGSEKYYVDSVKGRLTISRDNAKTSLYLQMNSLRAEDTAVYYCVRFVSLGYWGQGTPVTVSS

SEQ ID NO: 25127 - protein, 102 aa, Homo sapiens
ASGYTFTNFAIHWVRQAPGQRLEWMGWINAGNGNTKYSQKFQGRVTITRDTSASTAYMDLSSLRSEDTAAYYCARAHYDILTGSSLNWFDPWGQGTLVTVSS

SEQ ID NO: 25128 - protein, 102 aa, Homo sapiens
ASGYTFTNYAIHWVRQAPGQRLEWMGWINAGNGNTKYSQKLQGRVTISRDTSASTAYMDLSSLRSEDTAAYYCARAHYDILTGSSLNWFDPWGQGSLVTVSS

SEQ ID NO: 25129 - protein, 101 aa, Homo sapiens
SGYTFTSFGIHWVRQAPGQRLEWVGWINADNGNTKYSRKFQGRVTITRDTSANTAYMELSSLRSEDTAMFYCARAHYDILTGSSLNWFDPWGQGTLVTVSS

SEQ ID NO: 25130 - protein, 101 aa, Homo sapiens
SGYTFTSYAIHWVRQAPGQRLEWVGWINADNGNTKYSRKFQGRVTITRDTSANTAYMELSSLRSEDTAVYYCARAHYDILTGSSLNWFDPWGQGTLVTVSS

SEQ ID NO: 25131 - protein, 101 aa, Homo sapiens; identical to SEQ ID NO: 25129

SEQ ID NO: 25132 - protein, 95 aa, Homo sapiens
AASGFTFSGYWFHWVRQVPGKGLVWVSRIDMDGSRTNYADSVKGRFTISRDNAKNTLYLQMNSLRVDDTAVYYCARDLTGPVDYWGQGTLVTVSS

SEQ ID NO: 25133 - protein, 95 aa, Homo sapiens
AASGFTFSDYWMHWVRQAPGTGLVWVSRINREGTYTTYADSVKGRFTISRGNAKDTLYLQMNSLRAEDTAVYFCARDLTGPVDYWGQGTLVTVSS

SEQ ID NO: 25134 - protein, 92 aa, Homo sapiens
VASGFTFRDYYMGWIRQAPGKGLEWVSYITSSGSTMYYADSVKGRFTISRDNAKNSLYLQMNSLRAEDTAVYYCARPGADYWGQGTLVTVSS

SEQ ID NO: 25135 - protein, 91 aa, Homo sapiens
AASGFIFSDTDMIWIRQAPGKGLEWISYITVRGSNIYYKDSVKGRFTISRDDAENSLFLQMNSLRVEDTAVYYCARPGADYWGQGTLVTVS

SEQ ID NO: 25136 - protein, 94 aa, Homo sapiens
GSGYTFADLRMNWVRQLPGKGLEWITFIRTNVDGGTPEYAASVRGRFTVSRDDSESISYLLMTDLQIEDTGVYFCTRGHYDSYWGQGALVTVSS

SEQ ID NO: 25137 - protein, 93 aa, Homo sapiens
SGYNFADLRMNWVRQVPGKGLEWISFIRTDVDGGTPEYAASVRGRFTVSRDDSKSISYLLMRDLQIDDTGVYFCTRGHYDSYWGQGALVTVSS

SEQ ID NO: 25138 - protein, 95 aa, Homo sapiens
TTSGFTFGDFIINWVRQGPGKRLEWVGFIRTGANGGTTEYAASVKGRFSISRDDSKSIAYLQMNSLKIEDTALYYCTRGHYDSYWGQGTLVTVSS

SEQ ID NO: 25139 - protein, 93 aa, Homo sapiens
SGYNFAHLRMNWVRQVPGKGLEWISFIRTDVDGGTPEYAASVRGRFTVSRDDSKSISYLLMRDLQIDDTGVYFCTRGHYDSYWGQGALVTVSS

SEQ ID NO: 25140 - protein, 94 aa, Homo sapiens
AASGFTFTNYWMTWVRQAPGKGLELVANINEDGSEQYYVDSVRGRFTISRDNTKNSLYLQMNSLRPEDTAVYFCARARDFAVYWGQGTLVTVSS

SEQ ID NO: 25141 - protein, 94 aa, Homo sapiens
AASGFTFTSYWLTWVRQAPGKGLEWVANINEDGSEKYYVDSVKGRFTISRDNAKNSLYLQMNSLRAEDTAVYYCARARDFAVYWGQGTLVTVSS

SEQ ID NO: 25142 - protein, 92 aa, Homo sapiens
AASGFTFSSYAMSWVRQAPGKGLEWVSAIGSSTYYADSVKGRFTISRDSSKETLYLQMNSLRVEDTAVYYCAKGDRGSGWYWGQGTLVTVSS

SEQ ID NO: 25143 - protein, 95 aa, Homo sapiens
AASGFTFSSYAMSWVRQAPGKGLEWVSAIGGSGSPTVYADSVKGRFTISRDNSKNTLYLETSSLRAEDTALYYCAKGDRGSGWYWGQGTLVTVSS

SEQ ID NO: 25144 - protein, 93 aa, Homo sapiens
AASGFTFSNYAMSWVRQAPGKGLEWVSVISGSGGSTYYADSVKGRFTISRDNSKNTLYLQMNSLRAEDTAVYYCAKDRGCAYWGQGTLVTVSS

SEQ ID NO: 25145 - protein, 93 aa, Homo sapiens
AASGFTFSSYAMSWVRQAPGKGLEWVSVIGGSGGTTYYADSVKGRFTISRDNSKNTLYLQMNSLRAEDTAVYYCAKDRGCAYWGQGTLVTVSS

SEQ ID NO: 25146 - protein, 101 aa, Homo sapiens
AASGFTFSDHYMDWVRQAPGKGLEWVGRIRDKRTNYYTEYAAASVKGRFTISRDDSKNSVYLQMNSLETEDTAVYYCVRDGRAYGGYLDYWGQGTLVTVSS

SEQ ID NO: 25147 - protein, 100 aa, Homo sapiens
AASGFTFSAYYMDWVRQAPGKGLEWVGRIRDEVNGYITEYAASVRGRFTISRDDSKNSLYLQLNRLKADDTAVYFCVRDGRAYGGYLDYWGQGALVTVSS

SEQ ID NO: 25148 - protein, 96 aa, Homo sapiens
VASGFVFSSYEMNWVRQAPGKGLEWVTYISGSGSVRDYADSVKGRFTISRDNAENSLFLQMDSLTVADTALYYCARERPTSGFDYWGQGTLVTVSS

SEQ ID NO: 25149 - protein, 96 aa, Homo sapiens
AASGFTFSSFEMNWVRQAPGKGLEWVSYVNTDSSRKDFADSVKGRFTISRDNTQNSLYLQMNGLRAEDTAVYYCARERPTSGFDYWGQGTLVTVSS

SEQ ID NO: 25150 - protein, 96 aa, Homo sapiens; identical to SEQ ID NO: 25149

SEQ ID NO: 25151 - protein, 90 aa, Homo sapiens
AASGFTFSSYWMSWVRQAPGKGLEWVANIKQDGSEKYYVDSVKGRFTISRDNAKNSLYLQINSLRVEDTAVYYCARGSSWGQGTLVTVSS

SEQ ID NO: 25152 - protein, 90 aa, Homo sapiens
AVSGFTISSSWMNWVRQAPGKGLEWVAKVKEDGVEKHYVDSVKGRFTISRDNAKNSFYLQMNSVRAEDTAVYYCARGSSWGQGTLVTVSS

SEQ ID NO: 25153 - protein, 93 aa, Homo sapiens
AASGFTFNNYDMNWVRQAPGKGLEWISYISNSGSTIYYADSVKGRFTISRDNTKNSLYLQMNSLRAEDTAVYYCATGGGFDYWGQGTLVTVSS

SEQ ID NO: 25154 - protein, 93 aa, Homo sapiens
AASGFTFSTYDMNWVRQAPGKGLEWVSYISNSGSTIYYADSVKGRFTISRDNTKNSLYLQMNSLRAEDTAVYYCATGGGFDYWGQGTLVTVSS

SEQ ID NO: 25155 - protein, 93 aa, Homo sapiens
AASGFTFSSYEMNWVRQAPGKGLEWVSYISSSGSAKYYADSVKGRFTISRDNAKNSLYLQMNSLRAEDTAVYYCATGGGFDYWGQGTLVTVSS

SEQ ID NO: 25156 - protein, 96 aa, Homo sapiens
ATSGFIFSTYSMNWVRQAPGKGLEWVSSISRSSYTYYADSVQGRFTISRDDAKNSLYLQMSSLRAEDTAVYYCARGGGDYYANDYWGQGTLVSVSS

SEQ ID NO: 25157 - protein, 97 aa, Homo sapiens
AASGFTFSSYSMNWVRQAPGKGLEWVSSITSSSYYIFYADSVKGRFTISRDNAKNSLFLQMNSLRAEDTAVYYCARGGGDYYANDYWGQGTLVTVSS

SEQ ID NO: 25158 - protein, 97 aa, Homo sapiens
AASGFTFSSYSMSWVRQAPGKGLEWVAYIKTDESETSYVDSVKGRFTISRDNAKNSLSLQMNSLRTDDTAMYYCARWRGHQSEFDCWGQGTLVTVSS

SEQ ID NO: 25159 - protein, 97 aa, Homo sapiens
AASGFTFSSYSMSWVRQAPGKGLEWVAYIKTDESETSYVDSVKGRFTISRDNAKNSLSLQMNSLRADDTAMYYCARWRGHQSEFDCWGQGTLVTVSS

SEQ ID NO: 25160 - protein, 97 aa, Homo sapiens
AASGFTFGDYWMSWVRQAPGRGLEWVASIKSDGSEKFYVDSMMGRFTISRDNTQKSIYLQMNSLRVDDTAVYYCARWRGHQSEFDCWGQGALVTVSS

SEQ ID NO: 25161 - protein, 92 aa, Homo sapiens
AASGFTFGDYGMSWVRQAPGKGLEWVSGINWNGGSTGYADSVKGRFTISRDNAKNSLYLQMNSLRAEDTALYYCARDRGDYWGQGTLVTVSS

SEQ ID NO: 25162 - protein, 92 aa, Homo sapiens; identical to SEQ ID NO: 25161

SEQ ID NO: 25163 - protein, 99 aa, Homo sapiens
ISGDSVSSNSGAWNWIRQSPSRGLEWLGRTYYYGSKWHNDYTVSVKSRITVNPDTSKNQFSLHLNSVTPEDTAVYYCARGWMRGAMDVWGQGTTVTVSS

SEQ ID NO: 25164 - protein, 99 aa, Homo sapiens
ISGNGVSINTGAWNWIRQSPSRGLEWLGRTYYHQSKWNTDYVESLKSRMTVNADTSKNQFSLHLNSVTPEDTAVYYCARGWMRGAMDVWGQGTTVIVSS

SEQ ID NO: 25165 - protein, 96 aa, Homo sapiens
AATGFTFSDLYINWVRQAPGRGLEWVGRTTNKDVGYITEYAASVSGRFTISRDNSMDSVYLQMNSLKTEDTAVYYCAREIYGAFDYWGQGTLLTVS

SEQ ID NO: 25166 - protein, 97 aa, Homo sapiens
ATSDFTFSDHFLEWFRQAPGKGLEWIGRSKSKSNSYATEYAASVRGRFTISRDGSKNSLYLQMNSLKTDDTAVYYCAREIYGAFDYWGQGTLVTVSS

SEQ ID NO: 25167 - protein, 97 aa, Homo sapiens
ASGYTFTSYGISWVRQAPGQGLEWMGWISAYNGNTKYAQKLQGRVTMTTETSTSTAYMELRSLTSDDTAVYYCARSRGSGWYYFDYWGQGTLVTVSS

SEQ ID NO: 25168 - protein, 96 aa, Homo sapiens
SGYTFSSYGIAWVRQAPGQGLEWMGWISAYNGNTQYAQKLQDRVTMTTDTSTSTVYMELRSLRSDDTAVYYCARSRGSGWYYFDYWGQGTLVTVSS

SEQ ID NO: 25169 - protein, 94 aa, Homo sapiens
DSEFTFSNFWMHWVRQAPGKEPVWVSRINPGGTYTSYADFVKGRFTMSRDNAKNILYLQMNGLRVEDTAVYYCVRDMTAFHELWGQGTLVIVSS

SEQ ID NO: 25170 - protein, 95 aa, Homo sapiens
AGSGFVFSNFWMHWVRQVPGKGPMWVSRINLDGTVISYHDSVKGRFTISRDNAKNTVYLEMNSLRVEDTALYYCVRDMTAFHELWGQGALVTVSS

SEQ ID NO: 25171 - protein, 99 aa, Homo sapiens
TVSGGSISSYYWSWIRQPPGKGLEWIGYIYYSGSTNYNPSLKSRVTISVDTSKNQFSLKLTSVTAADTAVYYCARGPRYDSSGYPFDYWGQGTLVTVSS

SEQ ID NO: 25172 - protein, 99 aa, Homo sapiens
TVSGGSITSYYWSWIRQPPGKGLDWIGYIYYSGTTNYNPSLKSRVTISRDTSKNQFSLKLSSVTAADTAVYYCARGPRYDSSGYPFDYWGQGTLVTVSS

SEQ ID NO: 25173 - protein, 98 aa, Homo sapiens
AASGFTFTNSWMHWVRQAPGKGLVWVSRVNNDGTTTHYADSVKGRFTISRDNAKNTLYLQMNSLRAEDTAVYYCARILVGGTRSFDYWGQGTLVTVSS

SEQ ID NO: 25174 - protein, 98 aa, Homo sapiens
AASGFSFSNYWMHWVRQAPGKGLVWVSRISNDGSTTSYADSVKGRFTISRDNAENTLYVQMNSLRAEDTAVYYCARILVGGTRSFDYWGQGTLVTVSS

SEQ ID NO: 25175 - protein, 97 aa, Homo sapiens
ASGYTFSDYGVNWVRQAPGQGLEWLGWINGGNGQTGYSPDFQGRVTLTRDTSASTFYMELSTLRSEDAAVYYCARQGVPSINWYDPWGQGTLVTVSS

SEQ ID NO: 25176 - protein, 97 aa, Homo sapiens
ASGYTFTDYGINWLRQAPGQRPEWMGWINGGNGERGYSQKFQDRMSMTRDQSARAAYMELTSLRSEDTAVYYCARQGVPSINWYDPWGQGTLVTVSS

SEQ ID NO: 25177 - protein, 92 aa, Homo sapiens
VSGASINSDNYYWGWIRQPPGMGLEWIGNIYKSGSTNYSPSLKSRVTISVDTSKNQFSLKLTSVTAADTAVYYCVRGQWLGHWGQGTLVTVS

SEQ ID NO: 25178 - protein, 94 aa, Homo sapiens
TVSGGSISSIGYYWGWIRQPPGKGLEWIGNIYYNGTTYYNPSLKSRVTISVDTSKNQFSLKLTSVTAADTAVYYCVRGQWLGHWGQGTLVTVSS

SEQ ID NO: 25179 - protein, 93 aa, Homo sapiens
AASGFTFSSYEMNWVRQAPGKGLEWVSYISGSGSTTYYADSVKGRFTISRDNAKNTLYLQMNSLRAEDTAVYYCARGGGIGYWGQGTLVTVSS

SEQ ID NO: 25180 - protein, 93 aa, Homo sapiens
AASGFSFSNYEMNWVRQAPGKGPEWVSHINYSGSNMYYAESVKGRFTISRDNAKNSLYLQMNSLRAEDTAVYYCARGGGIGYWGQGALVTVPS

SEQ ID NO: 25181 - protein, 101 aa, Homo sapiens
AASGFTYNNYAMSWVRQAPGKGLEWVSGIINSGGSTYYADSVKGRFTVSRDNSKNMVYLQMNSLRAEDTAVYFCAKDRGDYGGNRRGFDYWGQGTLVTVSS

SEQ ID NO: 25182 - protein, 101 aa, Homo sapiens
AASGFTFSSYAMSWVRQAPGKGLEWVSGLSGSGGSTYYADSVKGRFTISRDNSKNTLFLQMDSLRVEDTAVYYCAKDRGDYGGNRRGFDYWGQGTLLTVSS

SEQ ID NO: 25183 - protein, 97 aa, Homo sapiens
AGSGFSFSNYAMTWVRQVPAKGLEWVSVIHGGGITYYADSVKGRFTISRDNSKNTLYLEMNDLRAEDTAIYYCARDDAVDGGYLDYWGRGTLVTVSS

SEQ ID NO: 25184 - protein, 97 aa, Homo sapiens
AGSGFSFSNYAMTWVRQVPAKGLEWVSVTHGGGITYYADSVKGRFTISRDNSKNTLYLEMNDLRAEDTAIYYCARDDAVDGGYLDYWGRGTLVTVSS

SEQ ID NO: 25185 - protein, 98 aa, Homo sapiens
AASGFTFSSYAMTWVRQAPGKGLEWVAVVMGRYGTTYYIDSVRGRFSISRDNSENTVYLQMNSLRAEDTAIYYCARDDAVDGGYLDYWGQGTLVTVSS

SEQ ID NO: 25186 - protein, 100 aa, Homo sapiens
AASGFTFSDHYMEWVRQAPGKGLEWVGRIRDKANSYTTEYAASVKGRFTISRDDSKNSLYLQMNSLRTEDTAVYYCARDARSYGGYFDYWGQGTLVTASS

SEQ ID NO: 25187 - protein, 100 aa, Homo sapiens
AASGFTFSDHYMDWVRQAPGKGLEWVGRIRNKANSYTTEYATSVKGRFTISRDDSKNSLYLQMNSLKTEDTAVYYCARDARSYGGYFDYWGQGTLVTVSS

SEQ ID NO: 25188 - protein, 100 aa, Homo sapiens; identical to SEQ ID NO: 25187

SEQ ID NO: 25189 - protein, 92 aa, Homo sapiens
AASGFTFSSYSMNWVRQAPGKGLEWVSLIYTGGTNTYYGDSVKGRFTISRDNSKNTLYLQMNSLRAEDTAVYYCTRSTDFDYWGQGTLVTVS

SEQ ID NO: 25190 - protein, 92 aa, Homo sapiens
AASGFTFSSYAMNWVRQAPGKGLEWVSLIYTGGTNTYYGDSVKGRFTISRDNSKNTLYLQMNSLRAEDTAVYYCTRSTDFDYWGQGTLVTVS

SEQ ID NO: 25191 - protein, 92 aa, Homo sapiens
AASGFTFSTYTLNWVRQAPGRGLEHVSVIYSSGSAYYADSVKGRFTISRDNSNNTLYLQMNSLRAEDTALYYCTRSTDFDYWGQGALVTVSS

SEQ ID NO: 25192 - protein, 97 aa, Homo sapiens
AASRFAFSTYAMHWVRQAPGRGLEWVALISFNGNNQYYADSVTGRFTISRDNSMNTLFLQMNSLRTEDTAVYYCARGHYDSSLFDYWGQGILVTVSS

SEQ ID NO: 25193 - protein, 97 aa, Homo sapiens
AASRFTFSTYAMHWVRQSPDRGLEWVALISFNGNNQYYSDSVKGRFTISRDNSKSTLYLQMNSLRGEDTAIYYCARGHYDSSLFDYWGQGTLVTVSS

SEQ ID NO: 25194 - protein, 97 aa, Homo sapiens
AASRFAFSTYAMHWVRQAPGRGLEWVALISFNGNNQYYADSVTGRFTISRDNSKSTLFLQMNGLRSEDTALYYCARGHYDSSLFDYLGQGTLVTVSS

SEQ ID NO: 25195 - protein, 93 aa, Homo sapiens
EVSGSAFSIFWMNWVRQAPGKGLEWVAHIKGDGSEMHYVDSVRGRFSISRDNTKNSLFLHMNSLRAEDTGIYYCTRGHYEAYWGQGTLVTVSS

SEQ ID NO: 25196 - protein, 93 aa, Homo sapiens
EVSGSAFSIFWMNWVRQAPGKGLEWVAHIKGDGSEMHYADSVRGRFSISRDNTKKSLFLHMNSLTAEDTGTYYCTRGHYEAYWGQGTLVTVSS

SEQ ID NO: 25197 - protein, 93 aa, Homo sapiens
VVSGFMIDRFWMNWVRQAPGKGLEWVAQIKGDGTEKYYVDSVKGRFTISRDNTKNSVYLQMNSLRDEDTAMYFCTRGHYEAYWGQGTRVTVSS

SEQ ID NO: 25198 - protein, 103 aa, Homo sapiens
AASGFTFSSYGMHWVRQAPGKGLEWVTVIWHDGSNKYYADSVKGRFTISRDNSKNTLYLQMNSLRAEDTAVYYCARGDDILTGYYYYYGMDVWGQGTTVTVSS

SEQ ID NO: 25199 - protein, 103 aa, Homo sapiens
AASGFTFSSYGMHWVRQAPGKGLEWVAIISYDGSNKYYADSVKGRFTISRDNSKNTLYLQMNSLRAEDTAVYYCARGDDILTGYYYYYGMDVWGQGTTVTVSS

SEQ ID NO: 25200 - protein, 90 aa, Homo sapiens
AASGFTVSSNYMSWVRQAPGKGLEWVSVIYSGGSTYYPDSVKGRFTISRDNSKNTLYLQMNSLRAEDTAVYYCVRGGWNWGQGTLVTVSS

SEQ ID NO: 25201 - protein, 90 aa, Homo sapiens
AASGFTVTSNYMTWVRQAPGKGLEWVSVIYGGDSTNYADSVKGRFTISRDNSKNTLYLQMNSLRADDTAMYYCVRGGWNWGQGTLITVSS

SEQ ID NO: 25202 - protein, 96 aa, Homo sapiens
AASGFTFSSYDMSWVRQAPGKGLEWVSAIRGSGSSTYYADSVKGRFTISRDNSKNTLYLQMNSLRAEDTAVYYCAKVKGNWYFDLWGRGTLVTVSS

SEQ ID NO: 25203 - protein, 96 aa, Homo sapiens
AASGFTFSTYDMAWVRQAPREGLEWVSAISGRDGGTTYADAVKGRFTISRDDSKNTLFLQMNTLRADDTAVYYCAKVKGNWYFDLWGRGTLVTVSS

SEQ ID NO: 25204 - protein, 96 aa, Homo sapiens
AASGFTFSTYDMAWVRQAPRKGLEWVSAISGRDGGTTYADAVKGRFTISRDDSKNTLFLQMNTLRADDTAIYYCAKVKGNWYFDLWGRGTLVTVSS

SEQ ID NO: 25205 - protein, 96 aa, Homo sapiens; identical to SEQ ID NO: 25204

SEQ ID NO: 25206 - protein, 96 aa, Homo sapiens
AASGFTFSTYDMVWVRQAPREGLEWVSAISGRDGGTTYADAVKGRFTISRDDSKNTLFLQMNTLRADDTAVYYCAKVKGNWYFDLWGRGTLVTVSS

SEQ ID NO: 25207 - protein, 96 aa, Homo sapiens
AASGFTFSTYDMAWVRQAPRKGLEWVSAISGRDGGTTYADAVKGRFTISRDDSKNTLFLQMNTLRADDTAVYYCAKVKGNWYFDLWGRGTLVTVSS

SEQ ID NO: 25208 - protein, 96 aa, Homo sapiens; identical to SEQ ID NO: 25203

SEQ ID NO: 25209 - protein, 96 aa, Homo sapiens
AASGFTFSTYDMAWVRQAPREGLEWVSAISGRDGGTTYADAVKGRFTVSRDDSKSTLFLQMNTLRADDTAVYYCAKVKGNWYFDLWGRGTLVTVSS

SEQ ID NO: 25210 - protein, 99 aa, Homo sapiens
ASGFTFSRSAVQWVRQARGQDLEWIGWIVVGSGNTNYAQKFQERVTFTRDMSTSTAYMELSSLRSEDTAVYYCAADRGFGDPYYGMDVWGQGTTVTVSS

SEQ ID NO: 25211 - protein, 99 aa, Homo sapiens
ASRFTFSSSALQWLRQARGQRLEWIGWIVVGSGNTNYAQTFQGRVTMTRDMSTSTAYMELSSLRSEDTAVYYCAADRGFGDPYYGMDVWGQGTTVTVSS

SEQ ID NO: 25212 - protein, 99 aa, Homo sapiens
ASGFTFSSTALHWVRQARGQRLEWIGWVVVHNGNTKYAQKFHERVTITRDMSTSTSYMEMSSLRSEDTAVYYCAADRGFGDPYYGMDVWGQGTTVTVSS

SEQ ID NO: 25213 - protein, 99 aa, Homo sapiens
ASGFTFSSTALHWVRQARGQRLEWIGWVVVGSGNTYYAQKFHERVSITRDMSTSTSYMELSSLRSEDTAVYYCAADRGFGDPYYGMDVWGQGTTVTVSS

SEQ ID NO: 25214 - protein, 99 aa, Homo sapiens
ASGFTLNSCAIQWVRQARGQRPEWVGWLVAHSGKTNYAERFQQRVTITRDMSTNTAYMELSSLTSEDTAVYYCAADRGFGDPYYGMDVWGQGTTVTVSS

SEQ ID NO: 25215 - protein, 99 aa, Homo sapiens
ASGFTFSSTALHWVRQARGQRLEWIGWIVVGSGNTNYAQKFQERVTITRDMSTSTAYMQLSSLRSEDTAVYYCAADRGFGDPYYGMDVWGQGTTVTVSS

SEQ ID NO: 25216 - protein, 92 aa, Homo sapiens
AASGFTVSSNFMSWVRQAPGKGLEWVSLINSVGTTYYADSVKGRFTISRDNSDNTLCLQANSLRAEDTAVYYCARGRGHDYWGQGTLVTVSS

SEQ ID NO: 25217 - protein, 92 aa, Homo sapiens
AASGFTVSSNYMSWVRQAPGKGLEWVSVIYSGGSTYYADSVKGRFTISRDNSKDTLYLQMNSLRAEDTAVYYCARGRGHDYWGQGTLVTVSS

SEQ ID NO: 25218 - protein, 94 aa, Homo sapiens
AASGFTFSSNWMHWVRQDPGKGLVWVSRTNEKGDWTNYADSVRGRFTISRDNAKNTLYLQMNSLTTEDTGVYYCARDLSGANDYWGQGTLVTVS

SEQ ID NO: 25219 - protein, 94 aa, Homo sapiens
AASGFTFSTNWMHWVRQDPGKGLVWVARTNEYGDWTNYADSVRGRFTISRDNAKNTLYLQMNSLTTEDTGVYYCARDLSGANDYWGRGTLVTVS

SEQ ID NO: 25220 - protein, 95 aa, Homo sapiens
AASGFTFSRNWMHWVRQVPGKGLEWVSRLNEDGSFTTYADSVKGRFTISRDNAQNTLYLQMNSLRAEDTAVYYCARDLSGANDYWGRGTLVTVSS

SEQ ID NO: 25221 - protein, 95 aa, Homo sapiens
AASGFTFSRNWMHWVRQVPGKGLEWVSRLNEDGSLTTYADPVKGRFTIYRDNAQNTLYLQMNSLRAEDTAVYYCARDLSGANDYWGRGTLVTVSS

SEQ ID NO: 25222 - protein, 95 aa, Homo sapiens
AASGFTFSRNWMHWVRQVPGKGLEWVSRLNEDGSLTTYADSVKGRFTISRDNAQNTLYLQMNSLRAEDTAVYYCARDLSGANDYWGRGTLVTVSS

SEQ ID NO: 25223 - protein, 95 aa, Homo sapiens; identical to SEQ ID NO: 25222

SEQ ID NO: 25224 - protein, 93 aa, Homo sapiens
AASGFTFSTSSFSWLRQAPGKGLEWVANINENGAQVYYVDSVRGRFTISRDNAKNSVHLQMNSLRVEDTAVFYCARGRGADFWGQGTPVTVSS

SEQ ID NO: 25225 - protein, 93 aa, Homo sapiens
AASGFIFTKYHMTWVRQAPGKGLEWVANIREGGRDKYYLDSVKGRFTISRDNAKNSLFLEMNSLRAEDTALYYCARGRGADFWGQGILVTVSS

SEQ ID NO: 25226 - protein, 101 aa, Homo sapiens
TVSGGSISNGIYYWAWIRQPPGKGLEFIGTIYYSGRTYYNPSLKSRVTISVDTSKNQFSLRLSSVTAPDTAFYYCARQEYCSGGSCSFDYWGQGTLVTVSS

SEQ ID NO: 25227 - protein, 101 aa, Homo sapiens
TVSGGPITSTSYYWAWIRQPPGKGLEWIGSIYYSGITYYKASLRSRVTLFVDTSKNHFSLRLSSVTAADTAIYYCARQEYCSGGSCSFDYWGQGTLVTVSS

SEQ ID NO: 25228 - protein, 95 aa, Homo sapiens
VASGFTFSSNAMSWVRQAPGKGLEWVGLIYSGGSSIYSTDSVKGRFTISRDNSKNTLYLQMNSLTAEDTAVYYCAKYRGNYFDSWGQGTLVTVSS

SEQ ID NO: 25229 - protein, 95 aa, Homo sapiens
VASGFTFSNNAMSWVRQAPGKGLEWVGLIYSGGSSIYSTDSVKGRFTISRDNSKNTMYLQMNSLTAEDTAVYYCAKYRGNYFDSWGQGTLVTVSS

SEQ ID NO: 25230 - protein, 94 aa, Homo sapiens
AASGFIFSNYAMSWVRQAPGKGLEWVSVIYSGTSSTYYADSVKGRFTISTDNSKNTLYLQINSLRAEDTAVYYCAKYRGNYFDSWGQGTLVTVS

SEQ ID NO: 25231 - protein, 95 aa, Homo sapiens
AASGFTFSSNAMSWVRQAPGKGLEWVGLIYSGGSSIYSTDSVKGRFTISRDNSKNTLYLQMNSLTAEDTAVYYCAKYRGNYFDSWGQGTLVTVSS

SEQ ID NO: 25232 - protein, 93 aa, Homo sapiens
ASGFTFSNSAVQWVRQARGQRLEWIGWIVVGSGKTNYAQKFKERLTIARDMSTRTAYMELSSLRSEDTAVYYCAADDLSSGYWGQGTLVTISS

SEQ ID NO: 25233 - protein, 93 aa, Homo sapiens
ASGFTFTSSAVQWLRQARGQRLEWIGWIVVGRGNTNYAQKFQERVTITRDMSTGTAYMELSSLRSEDTAVYYCAADDLSSGYWGQGTLVTVSS

SEQ ID NO: 25234 - protein, 93 aa, Homo sapiens
ASGFTFSNSAVQWVRQARGQRLEWMGWIVVGSGKTNYAQKFKERLTIVRDISTSTAYMELNSLRSEDTAVYYCAADDLSSGYWGQGTVVTVTS

SEQ ID NO: 25235 - protein, 96 aa, Homo sapiens
AASGFTFSYNWMSWVRQAPGKGLEWVANINQDGSETYYVDSVKGRFTISRDNAKNSLYLQMNSLRAEDTALYYCAGGSGIYSPDYWGQGTLVTVSS

SEQ ID NO: 25236 - protein, 96 aa, Homo sapiens
AASGFTFSRYWMSWVRQAPGKGLEWVANINEDGSEKYSVDSVKGRFTISRENAKNSLYLQMNSLRAEDTAVYYCAGGSGIYSPDYWGQGTLVTVSS

SEQ ID NO: 25237 - protein, 98 aa, Homo sapiens
AASGFTFSNAWMSWVRQAPGKGLEWVGRIKSKTDGGTTDYAAPVKGRFTISRDDSKNTLYLQMNSLKTEDTAIYYCTTDPFEAPLDYWGQGTLVTVSS

SEQ ID NO: 25238 - protein, 98 aa, Homo sapiens
AAFGFTFSNAWMSWVRQAPGKGLEWVGRIKSKIDGGTTDYAAPVKGRFTVSRDDSQNTLYLQMNSLKTEDTAVYFCTTDPFEAPLDYWGQGTLVTVSS

SEQ ID NO: 25239 - protein, 98 aa, Homo sapiens; identical to SEQ ID NO: 25238

SEQ ID NO: 25240 - protein, 98 aa, Homo sapiens
AASGFSFTNAWMSWVRQAPGKGLEWVGRIKSKTDGGTTDYAAPVKGRFTVSRDDSKNTLYLQMNSLKTEDTAVYYCTTDPFEAPLDYWGQGTLVTVSS

SEQ ID NO: 25241 - protein, 98 aa, Homo sapiens
AASGLTFSNFAFHWVRQAPGKGLEWVALISNDESNKRYSDSVKGRFIISRDNSKNTLYLQMDSLRDEDTAVYLCARGAGPGSYRIDYWGRGTLVTVSS

SEQ ID NO: 25242 - protein, 98 aa, Homo sapiens
AASGFTFSSFAMHWVRQAPGKGLEWVALMSYDGNNEKYADSVKGRFTISRDNSKNTLYLQMSTLRIEDTAVYYCARGAGPGSYRIDYWGQGTLVTVSS

SEQ ID NO: 25243 - protein, 98 aa, Homo sapiens
GASGFTFSGFAVHWVRQAPGKGLDWVALMSHDGSNERYADSVKGRFTISRDNSRNTVYLQMNTLRLEDTAVYYCARGAGPGSYRIDYWGQGTLVTVSS

SEQ ID NO: 25244 - protein, 98 aa, Homo sapiens; identical to SEQ ID NO: 25242

SEQ ID NO: 25245 - protein, 94 aa, Homo sapiens
AASGFTFADYTMNWVRQAPGKGLEWISHIGAWSGTVLDADSVRGRFTTSRDTTKNSLHLQMNSLRDEDTAVYFCVRDLHWAFDSWGQGTLVTVS

SEQ ID NO: 25246 - protein, 95 aa, Homo sapiens
AASGFTFSTDPMNWVRQAPGKGLEWLANIRDNGYETYYADSVKGRFTVTRDNAKESLYLQMNSLRAEDTAVYFCVRDLHWAFDSWGQGALVTVSS

SEQ ID NO: 25247 - protein, 95 aa, Homo sapiens
AASGFTFSTDPMNWVRQAPGKGLEWLANIRDNGYETYYADSVKGRFTVTRDNAKESLYLQMNSLRAEDTAVYFCVRDLHWAFDSWGQGALVIVSS

SEQ ID NO: 25248 - protein, 94 aa, Homo sapiens
ASGFTFSTDPMNWVRQAPGKGLEWLANIRDNGYETYYADSVKGRFTVTRDNAKESLYLQMNSLRAEDTAVYFCVRDLHWAFDSWGQGALVTVSS

SEQ ID NO: 25249 - protein, 94 aa, Homo sapiens
AASGFTFRTYWMSWVRQAPGKRPEWVANINQDGSDFYVDSVKGRFTISRDNAKNSLFLQMNTLRAEDTAVYYCARDNYGLFDYWGQGTLVTVSS

SEQ ID NO: 25250 - protein, 95 aa, Homo sapiens
AGSGFTFSSYWISWVRQAPGKGLEWVANMNQDGSERYYVDSVKGRFTISRDNAKNSLYLQMSSLRAEDTAVYFCARDNYGLFDYWGQGTPVTVSS

SEQ ID NO: 25251 - protein, 99 aa, Homo sapiens
AASGFTFSDYVMRWLRQAPGRGLEWVSTVSGNGRSTYYADSVKGRFTISRDNSKNTLYLQMNSLRAEDTAVYYCAKPLRGFTTPYFDCWGQGVLVTVSS

SEQ ID NO: 25252 - protein, 99 aa, Homo sapiens
EASGFSFSDYVMRWLRQAPGRGLEWVSTITGDGRNTYYADSVKGRFTISRDTSKNMLYLQMNSLRAEDTAVYYCAKPLRGFTTPYFDCWGQGALVTVSS

SEQ ID NO: 25253 - protein, 99 aa, Homo sapiens; identical to SEQ ID NO: 25252

SEQ ID NO: 25254 - protein, 99 aa, Homo sapiens
EASGFSFSDYVMRWLRQAPGRGLEWVSTITGNGRNTYYADSVKGRFTISRDTSKNMLYLQMNSLRAEDTAVYYCAKPLRGFTTPYFDCWGQGALVTVSS

SEQ ID NO: 25255 - protein, 99 aa, Homo sapiens
EASGFSFSDYVMRWLRQAPGRGLEWVSTITGDGRNTYYADSMKGRFTISRDTSKNMLYLQMNSLRAEDTAVYYCAKPLRGFTTPYFDCWGQGALVTVSS

SEQ ID NO: 25256 - protein, 99 aa, Homo sapiens; identical to SEQ ID NO: 25251

SEQ ID NO: 25257 - protein, 99 aa, Homo sapiens
AASGFTFSDYVMRWLHQAPGRGLEWVSTVSGNGRSTYYADSVKGRFTISRDNSKNTLYLQMNSLRAEDTAVYYCAKPLRGFTTPYFDCWGQGVLVTVSS

SEQ ID NO: 25258 - protein, 97 aa, Homo sapiens
VASGFTFSSYWMTWVRQAPGKGLEWVANIKQDGSEKYYVDSVKGRFTISRDNAKNSLYLQMNSLRAEDTAVYYCASHGYSYGYFDYWGQGTLVTVSS

SEQ ID NO: 25259 - protein, 97 aa, Homo sapiens
AASGFTFSSYWMSWVRQAPGKGLEWVANIKQDGSEKYYVDSVKGRFTISRDNAKNSLYLQMNSLRAEDTAVYHCASHGYSYGYFDYWGQGTLVTVSS

SEQ ID NO: 25260 - protein, 95 aa, Homo sapiens
AASGFAFSSYSMNWVRQVPGKGLEWVSYIISSSNTISYADSVKGRFTISRDNAKNSLYLQMDNLRDEDTAVYYCARDNRGSIDYWGQGTLVTVSS

SEQ ID NO: 25261 - protein, 95 aa, Homo sapiens
AASGFTFSSYTMSWVRQAPGKGLEWISYINAVSNPTYIAESVRGRFTISRDNAKNSLYLQMNSLRAEDTAVYFCARDNRGSIDYWGQGTLVTVSS

SEQ ID NO: 25262 - protein, 93 aa, Homo sapiens
AASGFTFSNYWMHWVRQAPGKGLMWVSRISGDGSATSYADSVKGRFTVSRDNAKNTLYLQMNSLRAEDTAVYYCAGLRLVDYWGQGTLVTVSS

SEQ ID NO: 25263 - protein, 93 aa, Homo sapiens
AASGFTFSNYWMHWVRQAPGKGLVWLSRISSDGSSTSYADSVKGRFTISRDNTKNTLYLQMNSLRAEDTAVYYCAGLRLVDYWGQGTLVTVSS

SEQ ID NO: 25264 - protein, 96 aa, Homo sapiens
AASGFTFGDYGMSWVRQAPGKGLEWVSGINWNGGSTGYADSVKGRFTISRDNAKNSLYLQMNSLRAEDTALYYCARESSSGWFDYWGQGTLVTVSS

SEQ ID NO: 25265 - protein, 96 aa, Homo sapiens; identical to SEQ ID NO: 25264

SEQ ID NO: 25266 - protein, 97 aa, Homo sapiens
TTSGFIFGDYAMSWVRQAPGKGLEWVGFIRSKAYGGTTEYAASVKGRFTISRDDSKSIAYLQMNSLKTEDTAVYYCTREDGGGTDYWGQGTLVTVSS

SEQ ID NO: 25267 - protein, 97 aa, Homo sapiens
TASGFTFGDYAMSWFRQAPGKGLEWVGFIRNKAYGGTTEYAASVKGRFTISRDDSKSIAYLQMNSLKTEDTALYFCTREDGGGTDYWGQGTLVTVSS

SEQ ID NO: 25268 - protein, 97 aa, Homo sapiens; identical to SEQ ID NO: 25267

SEQ ID NO: 25269 - protein, 97 aa, Homo sapiens; identical to SEQ ID NO: 25267

SEQ ID NO: 25270 - protein, 96 aa, Homo sapiens
AASGFTFRSSGMHWVRQAPGKGLEWVAVIWYDGSNIYYADSVKGRFTISRDDSKNTLYLQMNSLRAEDTAVYYCAKKLGDWSFDYWGQGTLVTVSS

SEQ ID NO: 25271 - protein, 96 aa, Homo sapiens
AASGFTFSSYGFHWVRQAPGKGLEWVAVIWYDGSNKYYADSVKGRFTISRDNSKNTLYLQMNSLRADDTAVYYCAKKLGDWSFDYWGQGTLVTVSS

SEQ ID NO: 25272 - protein, 97 aa, Homo sapiens
ISGDSLFSSDVAWNWIRQSPSGGLEWLGRTYYRSKWYYEYAVSVRSRITINPDTSKNQFSLQLNSVTPEDRAVYYCVRGQHSAFDLWGQGTVLTVSS

SEQ ID NO: 25273 - protein, 97 aa, Homo sapiens
ISGDSLFNTDVAWNWIRQSPSGGLEWLGRTYYRSKWYYEYAVSVRSRITINPDTSKNQFSLQLNSVTPEDTAVYYCVRGQHSAFDLWGQGTVLTVSS

SEQ ID NO: 25274 - protein, 97 aa, Homo sapiens
ISGDSLFNTNVAWNWIRQSPSGGLEWLGRTYYRSKWYYEYAVSVRSRITINPDTSKNQFSLQLNSVSPEDTAVYYCVRGQHSAFDLWGQGTVLTVSS

SEQ ID NO: 25275 - protein, 97 aa, Homo sapiens
ISGDSLFNTDVAWNWIRQSPSGGLEWLGRTYYRSEWFYEYAGSVRSRITINPDTSKNQFSLQLNSVSPEDTAVYYCVRGQHSAFDLWGQGTVLTVSS

SEQ ID NO: 25276 - protein, 97 aa, Homo sapiens
ISGDSLFSSDVAWNWIRQSPSGGLEWLGRTYYRSKWYHEYAVSVRSRITINPDTSKNQFSLQLNSVTPEDRAVYYCVRGQHSAFDLWGQGTVLTVSS

SEQ ID NO: 25277 - protein, 97 aa, Homo sapiens
ISGDSLFNTDVAWNWIRQSPSGGLEWLGRTYYRFKWYYEYAVSVRSRITINPDTSKNQFSLHLNSVTPEDRAVYYCVRGQHSAFDLWGQGTVLIVSS

SEQ ID NO: 25278 - protein, 97 aa, Homo sapiens; identical to SEQ ID NO: 25272

SEQ ID NO: 25279 - protein, 97 aa, Homo sapiens
ISGDSLFNTDVAWNGIRQSPSGGLEWLGRTYYRSKWYYEYAVSVRSRITINPDTSKNQFSLQLNSVTPEDTAVYYCVRGQHSAFDLWGQGTVLTVSS

SEQ ID NO: 25280 - protein, 97 aa, Homo sapiens
FSGDSFSSSSVAWNWIRQSPSRGLEWLGRTYYRSNWYNDYAESVKSRITINPDTSKNQFSLQLNSVTPEDTAVYYCVRGQHSAFDLWGQGTMVTVSS

SEQ ID NO: 25281 - protein, 98 aa, Homo sapiens
AVSGITVSSNHMNWVRQAPGRGLEWVSVIYRDGTTSYADSVKGRFTISRHSSTNTLDLQMYSLRDEDTAMYYCARDPAGDGYSLLDYWGQGTLITVSS

SEQ ID NO: 25282 - protein, 98 aa, Homo sapiens
AASAFTVSGHHMNWVRQAPGKGLEWVSTLYKDGRTSYADSVQGRFTISRDTSKNTLYLQMNSLRAEDTAVYYCARDPAGDGYSLLDYWGQGTLVTVSS

SEQ ID NO: 25283 - protein, 95 aa, Homo sapiens
AASGFTFSNSWMHWVRQAPGKGLVWVSRINSDWSSTIYADSVKGRFTISRDNAKNTLYLQMNSLKAEDTAMYYCARDYYHTIDYWGQGTLVTVSS

SEQ ID NO: 25284 - protein, 95 aa, Homo sapiens; identical to SEQ ID NO: 25283

SEQ ID NO: 25285 - protein, 95 aa, Homo sapiens
AASGFTFSNSWMHWVRQAPGKGLVWVSRINSDWSSTIYADSVKGRLTISRDNAKNTLYLQMNSLKAEDTAMYYCARDYYHTIDYWGQGTLVTVSS

SEQ ID NO: 25286 - protein, 94 aa, Homo sapiens
AAGFTFSSSWMHWVRQVPGKGLVWVSRINSDGSDTIYADSVKGRFTISRDNAKNTVHLQMNSLRAEDSAVYYCARDYYHTIDYWGQGTLVTVSS

SEQ ID NO: 25287 - protein, 97 aa, Homo sapiens
AASGFTFTDAWMSWVRQAPGKGLEWVGRIKSKVDGGTTEYAAPVEGRFIISRDDSRNTLSLQMNSLKTEDTAVYFCTTEYWGSLNNWGQGTLVTVSS

SEQ ID NO: 25288 - protein, 97 aa, Homo sapiens
AASGFTFTDAWMSWVRQAPGKGLEWVGRIKSKVDGGTTEYAAPVKGRFIISRDDSRNTLSLQMSSLKTEDTAVYFCTTEYWGSLNNWGQGTLVTVSS

SEQ ID NO: 25289 - protein, 97 aa, Homo sapiens
AASGFTFTDAWMSWVRQAPGKGLEWVGRIKSKVDGGTTEYAAPLKGRFIISRDDSRNTLSLQMSSLKTEDTAVYFCTTEYWGSLNNWGQGTPVTVSS

SEQ ID NO: 25290 - protein, 97 aa, Homo sapiens
AASGFAFNDAWMSWLRQAPGKGLEWVGHIKSKTAGGTTDYAAPVKGRVSISRDDSESKVYLQINILKTEDTAVYYCTTEYWGSLNNWGQGILVTVSS

SEQ ID NO: 25291 - protein, 97 aa, Homo sapiens
AASGFTFSNAWMSWVRQAPGKGLEWVARIKSKTDGGTPDYAAPVKGRFTISRDDSRTTLYLQMNSLKTEDTAVYYCTTEYWGSLNNWGQGSLVTVSS

SEQ ID NO: 25292 - protein, 97 aa, Homo sapiens; identical to SEQ ID NO: 25290

SEQ ID NO: 25293 - protein, 97 aa, Homo sapiens
AASGFAFNDAWMSWLRQAPGKGLEWVGHIKSKTAGGTTDYAAPVKGRVSISRDDSENKVFLQINSLKTEDTAVYYCTTEYWGSLNNWGQGILVTVSS

SEQ ID NO: 25294 - protein, 97 aa, Homo sapiens
AASGFAFNDAWMSWLRQAPGKGLEWVGHIKSKVAGGTTDYAAPVKGRVSISRDDSESKVYLQINSLKTEDTAVYYCTTEYWGSLNNWGQGILVTVSS

SEQ ID NO: 25295 - protein, 97 aa, Homo sapiens
EVSGFTFNVAWMIWVRQIPGKGLEWVGRIRSNKDGGTTESAASVKGRFLISRDDSKNTLYLQMNSLRIEDTAVYYCTTEYWGSLNNWGQGSRVTVSS

SEQ ID NO: 25296 - protein, 92 aa, Homo sapiens
VGSGFSFSNYWMHWVRQAPGRGLEWVSRINNGGSTYADSVKGRFTSSRDNAKSTIYLQMNSLRAEDTAIYFCARAGAAFDYWGHGTLVTVSS

SEQ ID NO: 25297 - protein, 94 aa, Homo sapiens
AASGFTFSNYWMHWVRQAPGKGLVWVSRINIDGTSTDYADSVKGRFTISRDYAKNTLYLEMNSLRAEDTAVYYCARAGAAFDYWGQGTLVTVSS

SEQ ID NO: 25298 - protein, 94 aa, Homo sapiens
AASGFTFSSYTMNWVRQAPGKGLEWVSSISSSSSYIYYADSVKGRFTISRDNAKNSLYLQMNSLRAEDTAVYYCARDQGPIDYWGQGTLVPVSS

SEQ ID NO: 25299 - protein, 94 aa, Homo sapiens
AASGVTFSSESMNWVRQAPGKGLEWVSSISSRSSYIYYADSVKGRFTISRDNAKNSLYLQMNSLRAEDTAVYYCARDQGPIDYWGQGTLVTVSS

SEQ ID NO: 25300 - protein, 94 aa, Homo sapiens
AASGFTFSSYSMNWVRQAPGKGLEWVSSISSSSSYIYYADSVKGRFTISRDNAKNSLYLQMNSLRVEDTAVYYCARDQGPIDYWGQGTLVTVSS

SEQ ID NO: 25301 - protein, 94 aa, Homo sapiens
AASGFTFSSYSMNWVRQAPGKGLEWVSSISSSSTYIYYAQSVKGRFTISRDNAKKSLYLQMNSLRAEDTAVYYCARDQGPIDYWGQGTLVTVSS

SEQ ID NO: 25302 - protein, 94 aa, Homo sapiens
AASGFSFSSYSMNWVRQAPGKGLEWLTSISSSSSYIYFADSVRGRFTISRDNAKNSLYLQMNSLRAEDTAVYYCARDQGPIDYWGQGTLVTVSS

SEQ ID NO: 25303 - protein, 94 aa, Homo sapiens
AASGVTFSSESMNWVRQAPGKGLEWVSSISSRSSYIYYADSVKGRFTISRDNAKNSLYLQMNSLRAEDMAVYYCARDQGPIDYWGQGTLVTVSS

SEQ ID NO: 25304 - protein, 94 aa, Homo sapiens; identical to SEQ ID NO: 25298

SEQ ID NO: 25305 - protein, 94 aa, Homo sapiens
AASGFTFRSYSMNWVRQAPGKGLEWVSCISSSSSYIYYADAVKGRFTISRDNAKNSLYLQMNSLRAEDTAVYYCARDQGPIDYWGQGTLVTVSS

SEQ ID NO: 25306 - protein, 90 aa, Homo sapiens
AASGFTFSSSWMNWVRQAPGKGLEWVANIKQDGSEKHYVDSVKGRFTISRDNPKNSLYLQMNSLRAEDTAVYYCTSRDYWGQGTLVTVSS

SEQ ID NO: 25307 - protein, 90 aa, Homo sapiens
AASGFTFSSSWMNWVRQAPGKGLEWVANIKQDGSEKHYVDSVKGRFTISRDNPKNSLYLKMNSLRAEDTAVYYCTSRDYWGQGTLVTVSS

SEQ ID NO: 25308 - protein, 90 aa, Homo sapiens
AASKFAFSSFYMSWVRQAPGKGLESVATINEDGRDKYYVDSVRGRFTISRDNAQNSLSLQMDSLRAEDTAVYYCTSRDYWGQGVLVTVSS

SEQ ID NO: 25309 - protein, 90 aa, Homo sapiens
AASGFTFSSSWMNWVRQAPGKGLEWVANIKQDGSEQHYVDSVKGRFSISRDNPRNSLYLQMNSLRAEDTAVYYCTSRDYWGHGTLVTVSS

SEQ ID NO: 25310 - protein, 95 aa, Homo sapiens
TVSPGSVRGHYWSWIRQPPGKGLEWLGYVYYTGITNFTPSLRSRAAISLDMSRDQFSLRLTSVTVADTAVYYCARGGSGYPLDFWGPGALVTVTS

SEQ ID NO: 25311 - protein, 95 aa, Homo sapiens
TVSPGSLRGQYWSWIRQPPGKGLEWIGYVYYTGTTNFTPSLKSRAAISLDMSRDKFSLTLRSLTVADTAVYYCARGGSGYPLDFWGPGALVTVTS

SEQ ID NO: 25312 - protein, 95 aa, Homo sapiens
TVSPGSVRGHYWSWIRQAPGKGLEWIGYVYYTGVTNFIPSLTRRAAISLDMSRDQFSLTIRGVTAADTGVYYCARGGSGYPLDFWGPGALVTVTS

SEQ ID NO: 25313 - protein, 94 aa, Homo sapiens
SVSGGPISGHYWSWIRQPPGKGLEWIGYIYYTGVTNYIPSLRSRLTLSLDTSKSQVSLNLISLTPADTAVYYCARGGSGYPLDFWGQGTLVSVS

SEQ ID NO: 25314 - protein, 95 aa, Homo sapiens
AASGFIVGANYMSWVRQAPGKGLEWVSIIYSGGNTYYADSVKGRFTMSRDNSKNTVYLQMNSLRVEDTAVYFCARDPRYSSGVYWGQGTLVTVSS

SEQ ID NO: 25315 - protein, 95 aa, Homo sapiens
AASGFLVSSNYMSWVRQAPGKGLEWVSIIYSGGSTYYADSVKGRFTISRDNSKNTLYLQMNSLRVEDTAVYFCARDPRYSSGVYWGQGTLVTVSS

SEQ ID NO: 25316 - protein, 95 aa, Homo sapiens
AASGFIVSANYMSWVRQAPGKGLEWVSLIYSGDTTYYADSVRGRFTISRDSSKNTLYLQMNSLRAEDTAVYYCARDPRYSSGVYWGQGTLVTVSS

SEQ ID NO: 25317 - protein, 97 aa, Homo sapiens
TVSGGSIRSNNHNWGWTRQPPGKGLEWIGSLYYTGSTYYNPSLKSRVTISVDTSKNQFSLKLFSVTAADTAVYYCSRVPSGSPGDYWGQGTLVTVSS

SEQ ID NO: 25318 - protein, 97 aa, Homo sapiens
SVSGGSIRSSDYNWGWSRHPPGEGLEWIGSVYHTGSTYYNPALKSRLTIAIDTSRNQFFLTLTSVSAADTATYYCSRVPSGSPGDYWGQGTVVTVSS

SEQ ID NO: 25319 - protein, 99 aa, Homo sapiens
TVSGGSMSSYYWNWIRQPPGKGLEWIGYIYDSGSTNYNPSLKSRVTISIDTSKNQFSLKLSSVTAADTAVYYCARDRTTVSYYYGMDVWGQGTTVTVSS

SEQ ID NO: 25320 - protein, 99 aa, Homo sapiens
IVSGGSMSSYHWNWIRQPPGKGLEWIGYIYDSGSTNSNPSLKSRVTISIDTSKNQFSLKLSSVTAADTAVYYCARDRTTVSYYYGMDVWGQGTTVTVSS

SEQ ID NO: 25321 - protein, 99 aa, Homo sapiens; identical to SEQ ID NO: 25319

SEQ ID NO: 25322 - protein, 99 aa, Homo sapiens
TVSGGSMSSYYWNWIRQPPGEGLEWIGYIYDDGSTNYNPSLKSRVTISIDTSKNQFSLKLNSVTAADTAVYYCARDRTTVSYYYGMDVWGQGTTVTVSS

SEQ ID NO: 25323 - protein, 99 aa, Homo sapiens
TVSAGSMSSYYWNWIRQPPGKGLEWIGYIYDSGSTNYNPSLKSRVTISIDTSKNQFSLKLNSVTAADTAVYYCARDRTTVSYYYGMDVWGQGTTVTVSS

SEQ ID NO: 25324 - protein, 99 aa, Homo sapiens
TVSRGSISSYYWNWIRQPPGKGLEWIGYIYYSGSTNYNPSLNSRVTISVDTSKNQFSLKLSSVTAADTAVYYCARDRTTVSYYYGMDVWGQGTTVTVSS

SEQ ID NO: 25325 - protein, 94 aa, Homo sapiens
SVFDYSISIGYYWGWIRQPPGKGLEWIGSISHRGNTYYNPSLKSRVTISRDTSKNQFSLKLTSVTAADTAMYYCARDAVAGDYWGQGILVTVSS

SEQ ID NO: 25326 - protein, 92 aa, Homo sapiens
TVAGYPIDLGYYWGWVRQPPGKGLEWIGSISHRGGTYYSPSLSSRVTISRNTATNQFSLRLTSVSATDTAIYYCARDAVAGDYWGQGILVTV

SEQ ID NO: 25327 - protein, 94 aa, Homo sapiens
TVSGYSITIGYYWGWIRQSPGKGLEWIGSISHRGATYYNPSLKGRVTISRDTSKNQFTMNLYSVTAADTATYYCARDAVAGDYWGMGILVTVSS

SEQ ID NO: 25328 - protein, 94 aa, Homo sapiens
TVSGYPISIGYYWGWIRQAPGKGLEWIGSISHRGITYYNPSLESRVTISSDTSKNQFSLKLNFVTAADTAVYYCARDAVAGDYWGQGTLVTVSS

SEQ ID NO: 25329 - protein, 94 aa, Homo sapiens
TVSGYPIDIGYYWGWIRQPPGKGLEWIGSISHRGDTYYNPSLNSRVIISRDTSKNQFSLRLTSVTAADTAVYFCARDAVAGDYWGQGILVTVSS

SEQ ID NO: 25330 - protein, 92 aa, Homo sapiens
TVSGYPIYIGYYWGWIRQPPGKGLEWIGSISHRGDTYYNPSLNSRVTISRDTSTNQFSLRLSSVSATDTAVYYCARDAVAGDYWGQGILVTV

SEQ ID NO: 25331 - protein, 94 aa, Homo sapiens
TVSGYPITIGYYWGWIRQPPGGGLEWIGSISHRGATYYNPSLKGRVTISRDTSKNQFTMNLYSVTAADTGTYYCARDAVAGDYWGMGTLVTVSS

SEQ ID NO: 25332 - protein, 94 aa, Homo sapiens
SVSGYSISWGYYWGWIRQSPGKGLEWVGSISHRGSTYYNPSLKSRVTISLDTSKNQFSLELSSVTAADTAVYYCARDAVAGDYWGQGSLVTVSS

SEQ ID NO: 25333 - protein, 94 aa, Homo sapiens; identical to SEQ ID NO: 25325

SEQ ID NO: 25334 - protein, 92 aa, Homo sapiens; identical to SEQ ID NO: 25330

SEQ ID NO: 25335 - protein, 94 aa, Homo sapiens
TVSGYPITIGYYWGWIRQPPGKGLEWIGSISHRGSTYYNPSLKGRVSISLDTPNNQFSLTLRFVTAADTAVYYCARDAVAGDYWGEGTLVTVSS

SEQ ID NO: 25336 - protein, 94 aa, Homo sapiens
SVSGYSLTIGYYWGWIRKPPGKGLEWIGSISHRGLTYYNPSLRGRVTISRDTSKNQFFLQMISVTAADSAIYYCARDAVAGDYWGQGTSVTVSS

SEQ ID NO: 25337 - protein, 95 aa, Homo sapiens
VASGFCFACEPMNWVRQAPGKGLEWISHIRSNSDIITYADAVRGRFTISRDNDKSSLYLQMNSLADEDTAVYYCVRDYDYGFDYWGQGTLVTVSS

SEQ ID NO: 25338 - protein, 95 aa, Homo sapiens
AASGFTFNTYNMNWVRQPPGKGLEWVSHIGSSGGSIYYADSVKGRFAVSRDNAKNSLYLQVNSLRDEDTAVYYCVRDYDYGFDYWGQGTLVSVSS

SEQ ID NO: 25339 - protein, 95 aa, Homo sapiens
AASGFTFSSNGMHWVRQAPGKGLEWVAVIWYDGSKKYYADSVKGRFTISRDNSMDTLYLQMNNLRAEDTAVYYCARFQTGGLDYWGQGTLVTVSS

SEQ ID NO: 25340 - protein, 95 aa, Homo sapiens
AASGFSFSSNGMHWVRQAPGKGLEWVAVIWYDGSKKYYADSVKGRFTISRDNSLDTLFLQMNNLRAEDTAVYYCARFQTGGLDYWGQGTLVTVSS

SEQ ID NO: 25341 - protein, 95 aa, Homo sapiens
AASGFTFRSNAMHWVRQAPGKGLEWVAVIGFDGSKQYYADTVKGRFTISRDNSMNMLYLQMNSLRVEDTAVYYCARFQTGGLDYWGQGTLVTASS

SEQ ID NO: 25342 - protein, 101 aa, Homo sapiens
ASGFTLSKAWVAWVRQAPGKGLESVGRITSNADGGTTGYAAPVRGRFTVSRDDSTNTLFLQMNSLTAEDTAVYYCTTDQGNSSHFYSFDYWGRGTLVTVSS

SEQ ID NO: 25343 - protein, 102 aa, Homo sapiens
AASGFTLSNAWMTWVRQAPGMGLECVGRITSKTDGGTTGYAAPVKGRFTVSRDDSKNTLFLQMNSLKTEDTAMYFCTTDQGNSSHFYSFDYWGQGTLVTVSS

SEQ ID NO: 25344 - protein, 102 aa, Homo sapiens; identical to SEQ ID NO: 25343

SEQ ID NO: 25345 - protein, 96 aa, Homo sapiens
AASGFSFSNYWMSWVRQAPGKGLEWVANINQDGSEKYYVDSVKGRFTIARDNAKDSLYLQMNSLRAEDTAVYYCARSPGTGTVDYWGQGSRVTVSS

SEQ ID NO: 25346 - protein, 96 aa, Homo sapiens
AASGFIFSEDWMSWVRQAPGKGLQWVANINQDGSEKYYVDSVKGRFTIARDNAKDSLYLQMNSLRAEDTAVYYCARSPGTGTVDYWGQGSRVTVSS

SEQ ID NO: 25347 - protein, 96 aa, Homo sapiens; identical to SEQ ID NO: 25345

SEQ ID NO: 25348 - protein, 96 aa, Homo sapiens
AASGFSFSNYWMSWVRQAPGKGLEWVANINQGGSERYYVDSLKGRFTIARDNAKDSLYLQMNSLRAEDTAVYYCARSPGTGTVDYWGQGSRVTVSS

SEQ ID NO: 25349 - protein, 96 aa, Homo sapiens
AASGFSFSNDWMSWVRQAPGKGLEWVANINQDGSEKYYVDSVKGRFTIARDNAKDSLYLQMNSLRAEDTAVYYCARSPGTGTVDYWGQGSRVTVSS

SEQ ID NO: 25350 - protein, 96 aa, Homo sapiens
AASGFTFSHSWMSWVRQAPGKGLEWVANINQDGSEKYYVDSVEGRFTISRDNAKNSLYVQMSSLRAEDTAVYYCARSPGTGTVDYWGQGTQVTVSS

SEQ ID NO: 25351 - protein, 95 aa, Homo sapiens
VASGFTFSNYWMSWVRQAPGKGLEWVANINQDGSEKYYVDSVEGRFTISRDNAKNSLYVQLSSVRAEDTAAYYCARSPGTGTVDYWGQGTLVTVS

SEQ ID NO: 25352 - protein, 96 aa, Homo sapiens
AASGFTFSHSWMSWVRQAPGKGLEWVANINQDGSEKYYVDSVEGRFTISRDNAKNSLYVQMSSLRAEDTAVYYCARSPGTGTVDYWGQGSQVTVSS

SEQ ID NO: 25353 - protein, 96 aa, Homo sapiens
AASGFTFSHSWMSWVRQAPGKGLEWVANINQDGSEKYYVDSVEGRFTISRDNAKNSLYVQMSSLRAEDTAVYYCARSPGTGTVDYWGQGTLVTVSS

SEQ ID NO: 25354 - protein, 96 aa, Homo sapiens
AASGFTFSIYWMSWVRQAPGKGLEWVANIDQDGSATYYVDSVNGRFTMSRDNAKNSLYLQMNSLRADDTAMYYCARSPGTGTVDYWGQGTLVTVSS

SEQ ID NO: 25355 - protein, 96 aa, Homo sapiens
AASGFSFSYYWMSWVRQAPGKGLEWVANINQDGGEKYYVDSVKGRFTIARDNAKDSLYLQMNCLRAEDTAVYYCARSPGTGTVDYWGQGSRVTVSS

SEQ ID NO: 25356 - protein, 96 aa, Homo sapiens; identical to SEQ ID NO: 25345

SEQ ID NO: 25357 - protein, 92 aa, Homo sapiens
AASGFTFSSAWMSWVRQAPGQGLEWVATMKHDGSETYYVDSVKGRFTISRDNAKNSLYLQMNSLRAEDTAVYYCARGAGAIWGQGTMVTASS

SEQ ID NO: 25358 - protein, 92 aa, Homo sapiens
AASGFTLTMSWMSWVRQAPGKGLEWVALISQDGGGTAYVDSVKGRFTISRDIAKNSLYLQMNSLRVEDTAVYFCARGAGAIWGQGTLVTVSS

SEQ ID NO: 25359 - protein, 93 aa, Homo sapiens
AASGFTLGSFWMTWGRQAPGKGPEWVASMKPDGSGQYYVDSVKGRFTISRDNAKNSLYLQMNSLRAEDTAIYYCARARYFDSWGQGTLVTVSS

SEQ ID NO: 25360 - protein, 93 aa, Homo sapiens
AASGFTFSSFWMSWVRQAPGKGLEWVANIKQDGSEKYYVDSVKGRFTISRDNAENSLYLQMNSLRAEDTAVYYCARARYFDSWGQGTLVTVSS

SEQ ID NO: 25361 - protein, 94 aa, Homo sapiens
ASGFTFSNSAVQWVRQARGQRLEWIGWIVVGSGNTNYGQKFQERVTITRDMSTSTAYMELSSLRSEDTAVYFCAASIVATGASWGQGTLVTVSS

SEQ ID NO: 25362 - protein, 94 aa, Homo sapiens
ASGFTFSNSAVQWVRQARGQRLEWIGWIVVGSGNTNYAQKFQERVTITRDMSTSTAYMELSSLRSEDTAVYYCAASIVATGASWGQGTLVTVSS

SEQ ID NO: 25363 - protein, 94 aa, Homo sapiens
ASGFTFRNSAVQWVRQARGQRLEWIGWIVVGSGNTNYAQKFQERVTITGDMSTSTAYMELSSLRSEDTAVYYCAASIVATGASWGQGTLVTVSS

SEQ ID NO: 25364 - protein, 94 aa, Homo sapiens
ASGFTFSNSAVQWVRQARGQRLEWVGWIVVGSGNTDYAQKFQDRVTITRDMSTSTAYMEINSLRAEDSAVYYCAASIVATGASWGQGTLVTVSS

SEQ ID NO: 25365 - protein, 94 aa, Homo sapiens
ASGFTFTNSAVQWVRQARGQRLEWIGWIVVGTGNTNYAQKFQERVTISRDMATSTAYLELSSLRSDDTAVYYCAASIVATGASWGQGTLVTVSS

SEQ ID NO: 25366 - protein, 94 aa, Homo sapiens
ASGFTFSNSAVQWVRQARGQRLEWIGWIVVGSGNTNYAQNFHERVTITRDMSTSTAYMELSSLRSEDTAVYYCAASIVATGASWGQGTLVTVSS

SEQ ID NO: 25367 - protein, 94 aa, Homo sapiens
ASGFTFSNSAVQWVRQARGQRLEWIGWIVVGSGNTNYAQKFQQRVTISRDMSTSTAYMELSSLRSEDTAVYYCAASIVATGASWGQGTLVTVSS

SEQ ID NO: 25368 - protein, 94 aa, Homo sapiens
ASGFTFRNSAVQWVRQARGQRLEWIGWIVVGSGNTNYAQKFQERVTIARDMSTSTAYMELSSLRSEDTAMYYCAASIVATGASWGQGTLVTVSS

SEQ ID NO: 25369 - protein, 94 aa, Homo sapiens
TVSGGSINDNYWSWIRQPPGKGLEWIGYVYYKGNTDYNPSFKSRVTISVDTSRNQFSLKLSSVTAADTALYYCARDLNRNLDYWGQGTLVTVSS

SEQ ID NO: 25370 - protein, 94 aa, Homo sapiens
TVSGGSIRGFYWSWIRQPPGGGLEWIGYVFYRGNTDYNPSLKSRVTMSVDTSKNQFSLKLSSVTAADTAVYYCARDLNRNLDYWGQGTLVTVSS

SEQ ID NO: 25371 - protein, 93 aa, Homo sapiens
VVSGFPFSTYAMSWFRQAPGKGLEWVATISGSGGSAYYADSVKGRFTISRDNSKTMLYLQMNSLRADDTAVYYCAKEVTGTDWGQGTLVTVPS

SEQ ID NO: 25372 - protein, 93 aa, Homo sapiens
GASGFTFSNYAMSWFRQAPGKGLEWVSTVSGSGGSTYYADSVMGRYTISRDNSKSQLYLQMNSLRVDDTAVYYCAKEVTGTDWGQGALVTVSS

SEQ ID NO: 25373 - protein, 92 aa, Homo sapiens
ASGFTFNSYAMSWFRQAPGKGLEWVTTINDSGGNRYYAASVRGRFTISRDNSKNTLFLQMNSLRADDTAIYYCAKEVTGTDWGQGILVTVSS

SEQ ID NO: 25374 - protein, 93 aa, Homo sapiens
AASGFTFSTYAMSWVRQAAGKGLVWVSTISGSGGSTYYADSVKGRFTIARDNSKNTLYLQMNSLRAEDTAVYYCAKEVTGTDWGQGTLVTVSS

SEQ ID NO: 25375 - protein, 93 aa, Homo sapiens
AASGFTFTSYAMSWFRRAPGKGLEWVATINGGGSSTYYADSVKGRFTISRDNSKATLFLQMNSLRADDTAVFYCAKEVTGTDWGQGTLVTVSS

SEQ ID NO: 25376 - protein, 93 aa, Homo sapiens
AASGFTFSSYAMSWVRQAPGKGLEWVSSISGSGDNTYYADSVKGRFTISRDNFKTTLYLQMDSLRADDTALYYCAKEVTGTDWGQGTLVTVSS

SEQ ID NO: 25377 - protein, 93 aa, Homo sapiens
AASGFTFSDYAMSWVRQAPGKGLEWVSTLSGSGGSTYYADSVNGRFTISRDNSKNTVYLQMNGLRAEDTAIYYCAKEVTGTDWGQGTLVTVSS

SEQ ID NO: 25378 - protein, 93 aa, Homo sapiens
AASGFTFSDFAMSWFRQAPGKGLEWVSTLSGSGTSTYYADSVKGRFTISRDNSKNMLYGQMNRLRAEDTALYYCAKEVTGTDWGQGTLVTVSS

SEQ ID NO: 25379 - protein, 93 aa, Homo sapiens
AASGFTYSTYAMSWVRQPPGKGLEWVSTISGSGGSTYYADSVKGRFTISRDNAKTTLYLQMNSLRVDDTAVYYCAKEVTGTDWGQGSLVTVSS

SEQ ID NO: 25380 - protein, 93 aa, Homo sapiens
AASGFIFSSYAMSWVRQAPGKGLEWVSSLSGSGGNTYYADSVKGRFTISRDNSKTTVYLQMNSLRVDDTAIYYCAKEVTGTDWGQGTLVTVSS

SEQ ID NO: 25381 - protein, 93 aa, Homo sapiens
AASGFTFSSFAMSWFRQVPGKGLDWVSTISGSGGSTYYADSVKGRFTISRDNSKTTLYLQMNSLRVDDTAVYYCAKEVTGTDWGQGTLVTVSS

SEQ ID NO: 25382 - protein, 93 aa, Homo sapiens
VASGFTFSTYAMSWFRQAPGKGLQWVATIGGDGENTYYAVSVKGRFTLSRDNSKTKLYLQMNSLRADDTAVYFCAKEVTGTDWGQGTLVTVSS

SEQ ID NO: 25383 - protein, 93 aa, Homo sapiens
AASGFTFSNYAMSWVRQAPGKGLEWVSTLSGSGSSTYYADSVKGRFIISRDNSKNTVYLEMNRLKGDDTAVYYCAKEVTGTDWGQGTLVTVSS

SEQ ID NO: 25384 - protein, 93 aa, Homo sapiens
AASGFTFSSFAMSWVRQAPGKGLEWVSTLNYNGDNRYYADSVKGRFTISRDNSKTTLYLQMSSLRPDDTAVYYCAKEVTGTDWGQGTLVTVSS

SEQ ID NO: 25385 - protein, 92 aa, Homo sapiens
ASGFTFSNFAMSWFRQAPGKGLEWVSTISDTGDGTYYADAVKGRFTISRDNSKNTLYLQMNSPRVGDTAMYYCAKEVTGTDWGQGTLVTVSS

SEQ ID NO: 25386 - protein, 92 aa, Homo sapiens
ASGFTFSNYAMSWFRQAPGKGLEWVSTLSGSGSSTYYADSVKGRFTISRDNSKAMTYLQMNSLRADDTAVYYCAKEVTGTDWGQGTLVTVSS

SEQ ID NO: 25387 - protein, 93 aa, Homo sapiens
AASGFTFNNYAMSWVRQAPGKGLEWVSTISGGGSSTYYADSVKGRFTISRDNSKNTLYVQMNSLRAEDTAIYYCAKEVTGTDWGQGTLVTVSS

SEQ ID NO: 25388 - protein, 93 aa, Homo sapiens
AASGFIFTNYAMTWVRQAPGRGLEWVSTISGSGGSTSYADSVKGRFTISRDNSKTTLYLQMNSLRADDTAVYYCAKEVTGTDWGQGTLVTVSS

SEQ ID NO: 25389 - protein, 93 aa, Homo sapiens
AASGFTFSSYAMSWVRQTPGKGLDWVATISRDSTNIYYADSVKGRFTISRDNSKTTLYLQMNNLRVGDTAVYYCAKEVTGTDWGQGTLVTVSS

SEQ ID NO: 25390 - protein, 93 aa, Homo sapiens
AASGFTFSTYAMSWVRQAPGKGLEWVATISGGGSSTYYADSVKGRFTISRDNSKTTLYLQMNSLRADDTAVYYCAKEVTGTDWGQGTLVTVSS

SEQ ID NO: 25391 - protein, 93 aa, Homo sapiens
AASGFSFTNYAMSWFRQAPGKGLEWVSTISGDGENTYYADSVKGRFTISRDNSKNTLNLQMNSLRADDTAVYYCAKEVTGTDWGQGTLVTVSS

SEQ ID NO: 25392 - protein, 93 aa, Homo sapiens
AASGFTFTNYAMSWVRQAPGKGLQWVSTISGSGRNIYYADSVKGRFTISRDNSRATLSLQMNSLRADDTAVYYCAKEVTGTDWGQGILVTVSS

SEQ ID NO: 25393 - protein, 93 aa, Homo sapiens
AASGFTFSSYAMSWVRQAPGKGLEWVSTVSGSGGSTYYADSVKGRFTISRDNSKTTLYLQMNSLRADDTAVYYCAKEVTGTDWGQGTLVTVSS

SEQ ID NO: 25394 - protein, 93 aa, Homo sapiens
AASGFTYSTYAMSWVRQPPGKGLEWVSTISGSGGSTYYADSVKGRFTISRDNSKTTLYLQMNSLRVDDTAVYYCAKEVTGTDWGQGSLVTVSS

SEQ ID NO: 25395 - protein, 93 aa, Homo sapiens
VASGFTFSSYAMSWFRQAPGKGLDWVSTISGSGGSTYYADSVKARFTISRDNSKAALYLQMNSLRADDTAVYYCAKEVTGTDWGQGTLVTVAS

SEQ ID NO: 25396 - protein, 93 aa, Homo sapiens
AASGFTFSSYAMNWVRQAPGKGLEWVSTISGSGGKTYYADSVKGRFTISRDNSKTTLYLQMNSLRADDTAVYYCAKEVTGTDWGQGILVTVSS

SEQ ID NO: 25397 - protein, 93 aa, Homo sapiens
AASGFTFSGYAMSWFRQAPGKGLEWVTSISGSGNNIYYADSVKGRFTISRDNSKTTLYVRMNSLRADDTAVYYCAKEVTGTDWGQGTLVTVSS

SEQ ID NO: 25398 - protein, 93 aa, Homo sapiens
AASGFTFTNYAMSWFRQAPGKGLEWVSTISGSGGSTYYADSVKGRFTISRDNSKNTLYLQMNSLRAEDTAVYLCAKEVTGTDWGQGTLVTVSS

SEQ ID NO: 25399 - protein, 93 aa, Homo sapiens
AASGFTFSTYAMSWVRQAPGKGLEWVATISGGGSTTYYADSVKGRFTISRDNSKTTLYLQMNSLRADDTAVYYCAKEVTGTDWGQGTLVTVSS

SEQ ID NO: 25400 - protein, 91 aa, Homo sapiens
AASGFTFNSYAMSWFRQAAGKGLEWVSTLSGSGGSTYYADSVKGRFTISRDNSKNTLYLQMNSLRAEDTAVYYCAKEVTGTDWGQGTLVTV

SEQ ID NO: 25401 - protein, 93 aa, Homo sapiens
AASGFTFSTYAMSWVRQAAGKGLEWVSTLSASGGSTYYADSVKDRFTISRDNSKNTVYLQMNRLRGEDTAVYYCAKEVTGTDWGQGTLVTVSS

SEQ ID NO: 25402 - protein, 100 aa, Homo sapiens
EASGFTLTNYAMTWVRQAPGKGLEWVSTISDSGDRTWYADSLKGRFTISRDNSKNTLFLQMNSLRAEDTALYYCARDGDDNRPPDAYDMWGQGTMVTVSS

SEQ ID NO: 25403 - protein, 100 aa, Homo sapiens
AASGFTFSNYAMTWVRQAPGKGLEWVSTISVIDDRTFSADFAKGRFTISRDNSKNTLFLQMNSLRAEDTAVYFCARDGDDNRPPDAYDMWGQGIMVTVSS

SEQ ID NO: 25404 - protein, 100 aa, Homo sapiens
AASGFTFTHYAMTWVRLAPGKGLEWVSTISGSSDRTWYADSVKGRFTISRDNSKDTLYLQMNSLRAEDTAVYYCARDGDDNRPPDAYDMWGQGTLVTVSS

SEQ ID NO: 25405 - protein, 97 aa, Homo sapiens
AASEFSVSDYWMSWVRQAPGKGLQWVANFNPNGIEKNYVDSVKGRFTVSRDNVKNSMYLQMDSLRAEDTGMYFCVRGGGSGWPFAYWGQGTLVTVSS

SEQ ID NO: 25406 - protein, 97 aa, Homo sapiens; identical to SEQ ID NO: 25405

SEQ ID NO: 25407 - protein, 97 aa, Homo sapiens
AASGFTFSTSWMSWVRQAPGKGLEWVANINLEGSEKNYMDSMKGRFTISRDNAKNSLFLQMNSLRDEDTALYFCVRGGGSGWPFAYWGPGTLVTVSS

SEQ ID NO: 25408 - protein, 97 aa, Homo sapiens
AASEFTVSDYWMSWVRQAPGKGLQWVANLNPNGIEKNYVDSVKGRFTVSRDNVKNSMYLQMDSLRAEDTGVYFCVRGGGSGWPFAYWGQGTLVTVSS

SEQ ID NO: 25409 - protein, 99 aa, Homo sapiens
AASGFTFNKYAIHWVRQAPGKGLEWVAVLSYDGGNEYYADSVKGRFTVSRDNSKNIMYLQMNSLRPEDTAVYYCARTIFGVVTDASDIWGQGTMVTVSS

SEQ ID NO: 25410 - protein, 99 aa, Homo sapiens
AASGFTFSRYGMHWVRQAPGKGLEWVAVISYDGSTKYYADSVKGRFTISRDNSKNPLSLQMNSLRVEDSAVYYCARTIFGVVTDASDIWGQGAMVIVSS

SEQ ID NO: 25411 - protein, 95 aa, Homo sapiens
AASGFIFSSSWMTWVRQAPGKGLEWVANIKQDGSEKYLVGSVKGRFTISRDNAESTLYLQLNSLRAEDTAVYYCARDHGSTIDYWGQGTLVTVSS

SEQ ID NO: 25412 - protein, 95 aa, Homo sapiens
AASGFTFSSSWMTWVRQAPGKGLEWVANIKQDGSEKYHVGSVKGRFTISRDNAKSSLYLQLNSLRAEDTAVYYCARDHGSTIDYWGQGTLVTVSS

SEQ ID NO: 25413 - protein, 94 aa, Homo sapiens
ASGFTFSSSWMTWVRQAPGRGLEWVANIKPDGSEKFHVGSVKGRFTISRDNAERSLYLQLNSLRAEDTAVYFCARDHGSTIDYWGQGTLVTVSS

SEQ ID NO: 25414 - protein, 95 aa, Homo sapiens
VASEFTFSNYWMTWVRQAPGKGLEWVANIKTDGSEKYYVESVKGRFTISRDNAKNSLYLQMDSLRVEDTAVFYCARDHGSTIDYWGQGTLVTVSS

SEQ ID NO: 25415 - protein, 100 aa, Homo sapiens
VGSGFTFSGYVMGWVRQAPGKGLEWVSGISGSGVNTYYADSVKGRLTISRDNSKNTLFLQMNSLRAEDTAVYYCAKGRSGGYDWYYFDYWGQGTLVTVSS

SEQ ID NO: 25416 - protein, 102 aa, Homo sapiens
AASGFTFSGYVMSWVRQAPGKGLEWVSGISGSGGSTFYADSVKGRFTISRDNSKNKNTLWLQMNSLRPEDSAVYYCAKGRSGGYDWYYFDYWGQGTLVTVSS

SEQ ID NO: 25417 - protein, 100 aa, Homo sapiens
AASGFTFSGYVMSWVRQAPGKGLEWVSGISGSGVSTYYADSVKGRFTISRDNSKNTMYLQMSSLRAEDTAVYYCAKGRSGGYDWYYFDYWGQGTLVTVSS

SEQ ID NO: 25418 - protein, 98 aa, Homo sapiens
AASGLIFSNAWMSWVRQAPGMGLEWVGRVTSKTDGGTTDYAAPVKGRFSISRDDSENTLYLQMNSLKTDDTAVYYCTTAVGHYGMDVWGQGTTVTVSS

SEQ ID NO: 25419 - protein, 98 aa, Homo sapiens
AASGFTFSNAWMSWVRQAPGKGLEWVGRIKSETDGGTTDYTAPVKGRFTISRDDSKNTLYLQMNSLKTEDTAVYHCTTAVGHYGMDVWGQGTTVTVSS

SEQ ID NO: 25420 - protein, 98 aa, Homo sapiens; identical to SEQ ID NO: 25419

SEQ ID NO: 25421 - protein, 97 aa, Homo sapiens
ASGFTFSNAWMSWVRQAPGKGLEWVGRIKSETDGGTTDYTAPVKGRFTISRDDSKNTLYLQMNSLKTEDTAVYHCTTAVGHYGMDVWGQGTTVTVSS

SEQ ID NO: 25422 - protein, 98 aa, Homo sapiens
AASGFTFSNAWMSWVRQAPGKGLEWVGRIKSESDGGTTDYTAPVKGRFTISRDDSKNTLYLQMNSLKTEDTAVYHCTTAVGHYGMDVWGQGTTVTVSS

SEQ ID NO: 25423 - protein, 96 aa, Homo sapiens
AASGFIFNNFWMNWVRQAPGKGLEWVATIKKDGSDKYYVDSVKGRFTISRDNAKNSLYLQMNSLRAEDTAVYYCARDQGWLQFDYWGQGTLVTVSS

SEQ ID NO: 25424 - protein, 96 aa, Homo sapiens
AVSGFNLNGYWMSWVRQAPGKGLEWVGHIKEDGSVKSYVVSVRGRFSVSRDNTKNSVYLQMNSLRADDTAVYYCARDQGWLQFDYWGQGSLVTVSS

SEQ ID NO: 25425 - protein, 98 aa, Homo sapiens
EASGFTFSTYVMYWVRQAPGKGLEYLSAISSHGVGTFYADSVKGRFTISRDNSKNTLYLQMGSLRVEDTAVYYCARGGSAWYGGFDYWGQGALVTVSS

SEQ ID NO: 25426 - protein, 98 aa, Homo sapiens
AASGFTFSSHVMYWVRQAPGKGLEYVSSISSNGVSTFYAKSVKGRFTISRDNSKNTLFLQMGSLRPEDMAVYYCARGGSAWYGGFDYWGQGTQVTVSS

SEQ ID NO: 25427 - protein, 98 aa, Homo sapiens; identical to SEQ ID NO: 25426

SEQ ID NO: 25428 - protein, 98 aa, Homo sapiens
EASGFTFSTYVMYWVRQAPGKGLEYVSAISSHGVGTFYADSVKGRFTISRDNSKNTLYLQMGSLRVEDMAVYYCARGGSAWYGGFDYWGQGTLVTVSS

SEQ ID NO: 25429 - protein, 92 aa, Homo sapiens
AASGFTFSSFAMNWVRQAPGKGLEWVSGITNSGDNTNYADSVKGRFTISRDNSKNTLYLEMDSLRAEDTALYYCARGLLGDWGQGTLVTVSS

SEQ ID NO: 25430 - protein, 92 aa, Homo sapiens
AASGFTFSSYAMNWVRQAPGKGLEWVSAISGSGGSTYYADSVKGRFTISRDNSKDTLYLQMNSLRAEDTAVYYCARGLLGDWGQGMLVTVSS

SEQ ID NO: 25431 - protein, 99 aa, Homo sapiens
KGSGYSFPNYWIAWVRQMPGKGLDWMGVIYPGDFDTRYSPSFQGQVTISADKSTSTAYLQWSSLKASDTAIYYCARRGYSRSSDGMDVWGQGTTVTVSS

SEQ ID NO: 25432 - protein, 98 aa, Homo sapiens
GSGYSFPTYWIAWVRQMPGKGLEWMGVIYPGDSDTRYSPSFQGQVTISADKSTSIAYLQWGSLKASDTAIYYCARRGYSRSSDGMDVWGQGTTVTVSS

SEQ ID NO: 25433 - protein, 99 aa, Homo sapiens
KGSGYSFANYWIAWVRQMPGKGLEWMGVIYPGDSDTRYGPSFQGQVTISGDKSTSTAYLQWSSLKASDTAIYYCARRGYSRSSDGMDVWGQGTTVTVSS

SEQ ID NO: 25434 - protein, 99 aa, Homo sapiens
KGSGYSFPNYWIAWVRQMPGKGLEWMGVIYPGDSDTRYSPSFQGQVTISADKSTTTAYLQWSSLKASDTAIYYCARRGYSRSSDGMDVWGQGTTVTVSS

SEQ ID NO: 25435 - protein, 99 aa, Homo sapiens
KGSGYSFPSYWIAWVRQMPGKGLEWMGVIYPGDSDTRYSPSFQGQVTISADKSTSTAYLQWSSLKASDTAIYYCARRGYSRSSDGMDVWGQGTTVTVSS

SEQ ID NO: 25436 - protein, 99 aa, Homo sapiens
KGSGYSFANYWIAWVRQMPGKGLEWMGVIYPGDSDTRYSPSFQGQVTISADKSTSTAYLQWSSLKASDTAIYYCARRGYSRSSDGMDVWGQGTTVTVSS

SEQ ID NO: 25437 - protein, 99 aa, Homo sapiens
KGSGYSFTNYWIGWVRQMPGKGLEWMGIIYPGDSGTRYSPSFQGQVTISADKSISTAYLQWSSLKASDTAMYYCARRGYSRSSDGMDVWGQGTTVIVSS

SEQ ID NO: 25438 - protein, 99 aa, Homo sapiens
KGSGYSFPTYWIAWVRQMPGKGLEWMGVIYPGDFDTRYSPSFQGQVTISADKSSSTAYLQWSSLKASDTAIYYCARRGYSRSSDGMDVWGQGTTVTVSS

SEQ ID NO: 25439 - protein, 99 aa, Homo sapiens
KGSGYSFPSYWIAWVRQMPGKGLEWMGVIYPGDFDTRYSPSFQGQVTISADKSTSTAYLQWSSLKASDTAIYYCARRGYSRSSDGMDVWGQGTTVTVSS

SEQ ID NO: 25440 - protein, 93 aa, Homo sapiens
AASGFPFSNNYMSWVRQAPGKGLEWVAGISGSGGSIYADSVKGRFTISRDNSKNTLYLQMNSLRVEDTAVYHCVRGAAGMDVWGQGTTVTVSS

SEQ ID NO: 25441 - protein, 94 aa, Homo sapiens
AASGFTFNNYGMSWVRQAPGKGLEWVSGISGSGGSTYYADSVRGRFTISRDNSKNTLYLQMNSLRVEDTAVYYCVRGAAGMDVWGQGTTVTVSS

SEQ ID NO: 25442 - protein, 95 aa, Homo sapiens
AASGFTFSSYWMHWVRQVPGEGLVWVSRINGDGTSTSSADHVKGRFIISRDNAKNTLYLQMNSLRVDDTAVYFCTRGGGGHGDYWGQGTLVTVSS

SEQ ID NO: 25443 - protein, 95 aa, Homo sapiens
AASGFTFSNSWMHWVRQAPGKGLVWVSRINSDGSTTSYADSVKGRFTISRDNTKNTLYLQMNSLRAEDTAVYYCTRGGGGHGDYWGQGTLVTVSS

SEQ ID NO: 25444 - protein, 95 aa, Homo sapiens
AASGFTFSNFWMHWVRQAPGKGLVWVSRINPDGITTSYADSVKGRFTISRDNTKNIMYLQMNSLRAEDTALYYCTRGGGGHGDYWGQGTLVTVSS

SEQ ID NO: 25445 - protein, 95 aa, Homo sapiens
TVSGGSIGTTSYYWSWIRQPAGKGLEWIGRVYTNGDTNYNPSLKSRVTMSVDTSKNQFSLRLSSVTAADTGVYYCARGGELLNYWGQGTLVTVSS

SEQ ID NO: 25446 - protein, 95 aa, Homo sapiens
TVSGGSIGSTSYYWSWIRKPAGKGLEWIGRIYTSGDTNYNPSLKSRVAISVDTSKNQFSLKLSSVTAADTAVYYCARGGELLNYWGQGTLVTVSS

SEQ ID NO: 25447 - protein, 95 aa, Homo sapiens
TVSGGSVSSGSYYWSWIRQPAGKRLEWIGRIYTSGSTNYNPSLKSRVTISLDTSKNQFSLRLNSVTAADTAVHYCARGGELLNYWGQGTLVTVSS

SEQ ID NO: 25448 - protein, 93 aa, Homo sapiens
SGDSISSYYWSWIRQSPGKGLEWIGYFYDSGSTSYNPSLKSRVTISVDTSKNQFSLRLTSVTAADTAVYYCARAPILYYFDYWGQGTLVTVSS

SEQ ID NO: 25449 - protein, 95 aa, Homo sapiens
TVSGGSISSYYWSWIRQPPGKGLEWIGYIYNSGRTDYNPSLKSRVTISVDTSKNQFSLKLTSVTAADTAVYYCARAPILYYFDYWGQGTLVTVSS

SEQ ID NO: 25450 - protein, 95 aa, Homo sapiens
TVSGGSISSYYWSWIRQPPGKELEWIGYIYNSGSTSYNPSLKSRVTISVDTSKNQFSLKLSSVTAADTAVYYCARAPILYYFDYWGQGTLVTVSS

SEQ ID NO: 25451 - protein, 95 aa, Homo sapiens
TVSGGSISSSYWSWIRQTPGKGLEWIGYIYNSGRTDYSPSLKSRVTISVDTSKNQFSLKLSSVTAADTAVYYCARAPILYYFDYWGQGTLVTVSS

SEQ ID NO: 25452 - protein, 95 aa, Homo sapiens; identical to SEQ ID NO: 25450

SEQ ID NO: 25453 - protein, 94 aa, Homo sapiens
AASGFTFNNYWMSWVRQAPGKGLEWVANITQDGSDKYYVDSVKGRFTISRDNAKSSLYVQMNSLTAEDTAVYYCVRDRRYFDLWGRGTLVTVSS

SEQ ID NO: 25454 - protein, 94 aa, Homo sapiens
AVSGFTFSSYWMAWVRQAPGKGLESMATIKEDGSEKYYVDSVKGRFTISRDNARNSLYLQMNSLRAEDTAVYYCVRDRRYFDLWGRGTLVTVSS

SEQ ID NO: 25455 - protein, 97 aa, Homo sapiens
AASGFTFSNYWMSWVRQAPGKGLEWLANIRQDGSEKYYVDSVKGRFTISRDNAKNSLYLQMNSLRAEDTAVYYCAGCGGDCYTVDHWGQGTLVTVSS

SEQ ID NO: 25456 - protein, 97 aa, Homo sapiens
AASRFTFSSYWMSWVRQAPGRGLECVANINQDGTEEYYLDSVKGRFTISRDNAKNSLYLQMNSLRAEDTAVYYCAGCGGDCYTVDHWGQGTLVTVSS

SEQ ID NO: 25457 - protein, 97 aa, Homo sapiens; identical to SEQ ID NO: 25456

SEQ ID NO: 25458 - protein, 97 aa, Homo sapiens
AASRFTFSSYWMSWVRQAPGKGLECVANINQDGSEKYYLDSVKGRFTISRDNARNSLYLQMNSLRAEDTAVYYCAGCGGDCYTVDHWGQGTLVTVSS

SEQ ID NO: 25459 - protein, 97 aa, Homo sapiens
AASRFSFSSYWMSWVRQAPGKGLEWVANIRQDGTERHYVDSVKGRFTISRDNAKNSVYLQMNSLRAEDTAVYYCAGCGGDCYTVDHWGQGTLVTVSS

SEQ ID NO: 25460 - protein, 97 aa, Homo sapiens
AASRFSFSSYWMSWVRQAPGKGLEWVANIRQDGSEKHYVDSVKGRFTISRDNAKNSLYLQMNSLRAEDTAVYYCAGCGGDCYTVDHWGQGTLVTVSS

SEQ ID NO: 25461 - protein, 97 aa, Homo sapiens
AASRFSFSSYWMSWVRQAPGKGLEWVANIRQDGSEKHYVDSVKGRFTISRDNAKNSLYLQMSSLRAEDTAVYYCAGCGGDCYTVDHWGQGTLVTVSS

SEQ ID NO: 25462 - protein, 97 aa, Homo sapiens
AASRFSFSSYWMSWVRQAPGKGLEWVANIRQDGSEKHYVDSVKGRFTISRDNGKNSLYLQMNSLRAEDTAVYYCAGCGGDCYTVDHWGQGTLVTVSS

SEQ ID NO: 25463 - protein, 97 aa, Homo sapiens
AASEYSFSSYWLSWVRQAPGKGPEWVANINQDGTERHYVDSVKGRFSISRDNTKNSLYLQMNSLRVEDTAVYYCAGCGGDCYTVDHWGQGTLVSVSS

SEQ ID NO: 25464 - protein, 97 aa, Homo sapiens
AASKYSFSSYWMSWVRQAPGKGLEWVANIKQDGSEKHYVDSVKGRFSISRDNTKNSLYLQMNSLRAEDTAVYYCAGCGGDCYTVDHWGQGTLVTVSS

SEQ ID NO: 25465 - protein, 97 aa, Homo sapiens
AASKYSFSSYWMSWVRQAPGKGLEWVANINQDGSEKHYVDSVKGRFSISRDNTRNSLYLQMISLRAEDTAVYYCAGCGGDCYTVDHWGQGTLVTVSS

SEQ ID NO: 25466 - protein, 97 aa, Homo sapiens
AASEYSFSNYWMSWVRQAPGRGLEWVANINQDGSEKHYVDSVKGRFSISRDNTKNSLYLQMISLRAEDTAVYYCAGCGGDCYTVDHWGQGTLVTVSS

SEQ ID NO: 25467 - protein, 97 aa, Homo sapiens
AASEYSFSNYWMSWVRQAPGRGLEWVANINQDGSEKHYVDSVKGRSSISRDNTKNSLYLQMISLRAEDTAVYYCAGCGGDCYTVDHWGQGTLVTVSS

SEQ ID NO: 25468 - protein, 97 aa, Homo sapiens
AASEYSFSSYWLSWVRQAPGKGLEWVANINQDGTERHYVDSVKGRFSISRDNTKNSLYLQMNSLRAEDTAVYYCAGCGGDCYTVDHWGQGTLVSVSS

SEQ ID NO: 25469 - protein, 97 aa, Homo sapiens; identical to SEQ ID NO: 25462

SEQ ID NO: 25470 - protein, 97 aa, Homo sapiens
AASKYSFSSYWMSWVRQAPGKGLEWVANINQDGSEKHYVDSVKGRFSISRDNTKNSLYLQMISLRAEDTAVYYCAGCGGDCYTVDHWGQGTLVTVSS

SEQ ID NO: 25471 - protein, 97 aa, Homo sapiens; identical to SEQ ID NO: 25460

SEQ ID NO: 25472 - protein, 97 aa, Homo sapiens
AASEYSFSNYWMSWVRQAPGKGLEWVANINQDGSEKHYVDSVKGRFSISRDNTKNSLYLQMNSLRAEDTAVYYCAGCGGDCYTVDHWGQGTLVTVSS

SEQ ID NO: 25473 - protein, 97 aa, Homo sapiens
AASRFSFGSYWMSWVRQAPGKGLEWVANIRQDGSEKHYVDSVKGRFTISRDNGKNSLYLQMNSLRAEDTAVYYCAGCGGDCYTVDHWGQGTLVTVSS

SEQ ID NO: 25474 - protein, 97 aa, Homo sapiens
AASKYSFSNYWMSWVRQAPGKGLEWVANINQDGSEKHYVDSVKGRFSISRDNTKNSLYLQMISLRAEDTAVYYCAGCGGDCYTVDHWGQGTLVTVSS

SEQ ID NO: 25475 - protein, 94 aa, Homo sapiens
AASGFTFSNYWMHWVRQAPGKGLEWVATIGPDGSREYYVDFVTGRFTISRDNADRSLYLQMNSLRAEDTALYYCARDPFREGCWGQGTLVTVSS

SEQ ID NO: 25476 - protein, 93 aa, Homo sapiens
ASGFTFSNYWMHWVRQTPGRGLEWVATIGPDGSVEYYVDSVTGRFTISRDNAKKSLDLQMNSLRAEDTAVYYCARDPFREGCWGQGTLVTVSS

SEQ ID NO: 25477 - protein, 94 aa, Homo sapiens
AASGFTFSNFWMHWVRQAPGKGLEWVATIGPDGSQKYYVDSVTGRFTISRDNAYRSLDLQMKSLRAEDTALYYCARDPFREGCWGQGTLVTVSS

SEQ ID NO: 25478 - protein, 94 aa, Homo sapiens
AASGFTFDNYWMTWVRQAPGKGLEWVANIKEDGSVQYYVDSVKGRFTISRDNSKNSLYLQMDSLRVEDAAVYYCARDPFREGCWGQGALVTVSS

SEQ ID NO: 25479 - protein, 98 aa, Homo sapiens
AASGFSFRSFEMNWVRQAPGKGLEWVSYMTGSGSLIYYADSVQGRFAISRDNAKNSLYLQMNSLRVEDTAVYYCARGSSGYDPNFDYWGPGTPVTVSS

SEQ ID NO: 25480 - protein, 98 aa, Homo sapiens
AASGFTFRSFEMNWVRQAPGKGLEWVSYMTGSGSLIYYADSVQGRFAISRDNAKNSLYLQMNSLRVEDTAVYYCARGSSGYDPNFDYWGPGTPVTVSS

SEQ ID NO: 25481 - protein, 98 aa, Homo sapiens
AASGFTFSSFEMNWVRQAPGKGLEWLSYISSAGDTIYYADSVKGRVTISRDNAKNSLFLQMNSLRAEDTAVYYCARGSSGYDPNFDYWGQGTLVTVSS

SEQ ID NO: 25482 - protein, 97 aa, Homo sapiens
ASGFTFSSFEMNWVRQAPGKGLEWLSYISSAGDTIYYADSVKGRVTISRDNAKNSLFLQMNSLRAEDTAVYYCARGSSGYDPNFDYWGQGTLVTVSS

SEQ ID NO: 25483 - protein, 91 aa, Homo sapiens
AAAGFSISGYTMNWVRQDPGKGLEWVSSISSSSAYIYYADSVKGRFTVSRDNAKNSLFLQMNSLSAEDTAVYYCARNFEYWGLGTLVTVSS

SEQ ID NO: 25484 - protein, 91 aa, Homo sapiens
AASGFTFSSYTMNWVRQAPGKGLEWVSSISGSSNYIYYGDSVKGRFTISRDNAKNSLFLQMNSLRAEDTAVYYCARNFEYWGQGTLVTVSS

SEQ ID NO: 25485 - protein, 91 aa, Homo sapiens
AASGFTFSSYTMNWIRQTPGKRLEWVSSISSSSSHIYYADSLKGRFTISRDNTKNSLYLQMNSLRAEDTAVYYCARNFEYWGQGTLVTVSS

SEQ ID NO: 25486 - protein, 97 aa, Homo sapiens
GGSGLNFTSNWMNWVRQAPGKGLEWVANIKPDGSEIQYVDSVRGRFTISRDNAKNSLFLQMSSLRAEDTAVYYCARGGDSRSVLHYWGQGTLVTVSS

SEQ ID NO: 25487 - protein, 97 aa, Homo sapiens; identical to SEQ ID NO: 25486

SEQ ID NO: 25488 - protein, 97 aa, Homo sapiens; identical to SEQ ID NO: 25486

SEQ ID NO: 25489 - protein, 97 aa, Homo sapiens
GASGLDFSSNWMNWVRQAPGKGLEWVANIGPDGNEKQYVDSVEGRFTISRDNVKHSLFLQMSSLRVEDTAVYFCARGGDSRSVLHYWGKGTLVTVSS

SEQ ID NO: 25490 - protein, 97 aa, Homo sapiens
AASGFTLSNYWMNWVRQAPGKGLEWVANIKQDGSEKEYVNSVKGRFTISRDNAKNSLYLQMNSLRAEDTAIYYCARGGDSRSVLHYWGQGTLVTVSS

SEQ ID NO: 25491 - protein, 95 aa, Homo sapiens
GASGFTLSSHWVNWFRQAPGKGLEWVTNMKEEGSEKFYIDSVRGRFTISRDNGKNSVYLQMNSLRVEDTAVYYCASGSGWLVDYWGQGTLVTVSS

SEQ ID NO: 25492 - protein, 95 aa, Homo sapiens
AASGFTFSNYWMNWVRQAPGKGLEWVANIKQDGGEQYYVDSVKGRFTISRDNAKNSLYLQMNSLRAEDTAVYYCASGSGWLVDYWGQGTLVTVSS

SEQ ID NO: 25493 - protein, 94 aa, Homo sapiens
AASGFTFSRYWMSWVRQAPGKGLEWVATIKRDGSEKYYVDSVKGRFTISRDNAKNSLYLQMNSLRAEDTAVYYCARLVHYFDYWGQGTLVTVSS

SEQ ID NO: 25494 - protein, 94 aa, Homo sapiens
AASGFTFSSYWMSWVRQAPGKGLEWVAHIKQDGSEKYYVDSVRGRFTISRDNAKNSLYLQMNSLRAEDTAVYYCARLVHYFDYWGQGTLVTVSS

SEQ ID NO: 25495 - protein, 98 aa, Homo sapiens
EASGFTFSNYWMHWVRQAPGKGLVWVSRINNDDGRFSDYADSVKGRFTISRDNAKNTLYLQMNSLRAEDTAVYYCVRGTSGWSGIDYWGQGVLVTVSS

SEQ ID NO: 25496 - protein, 97 aa, Homo sapiens
AASGFTFSSYWFHWVRQTPGKGLVCVSRIDADGSTTNYADSVKGRFTISRDNAENTLYLQMSSLRDEDTALYFCVRGTSGWSGIDYWGQGTLVTVSS

SEQ ID NO: 25497 - protein, 92 aa, Homo sapiens
AASGFTFSNAWMSWVRQAPGKGLEWVGRIKSKSDGGTTDYAAPVKGRFTISRDDSKNTLSLQMNSLKTEDTAVYYCTNVDYWGQGTLVTVSS

SEQ ID NO: 25498 - protein, 92 aa, Homo sapiens
AASGFAFTNAWMYWVRQAPGKGLEWVGRIKSASNGGTTDYTTPVKGRFIISRDDSKSTLYLQMNSLESEDTAVYYCTNVDYWGQGTLVTVSS

SEQ ID NO: 25499 - protein, 92 aa, Homo sapiens
AASGFAFTNAWMYWVRQAPGKGLEWVGRIKSASNGGTTDYITPVKGRFIISRDDSKSTLYLQMNSLESEDTAVYYCTNVDYWGQGTLVTVSS

SEQ ID NO: 25500 - protein, 102 aa, Homo sapiens
AASGFTFSNYGMSWVRQVPGKGLEWVSTIGGSGDSTNYVDSVKGRFTISRDNFKNTLYLQMNSLRAEDTAVYYCAKKYHYGSGTYLYYFDYWGQGTLVTVSS

SEQ ID NO: 25501 - protein, 102 aa, Homo sapiens
AASGFTFSHYAMSWVRQAPGKGLEWVSTVTASDSSTYYADSVKGRFTISRDNSKNTLYLQMNSLRAEDTAVYYCAKKYHYGSGTYLYYFDYWGQGTLVTVSS

SEQ ID NO: 25502 - protein, 97 aa, Homo sapiens
AASGFIFSSYEMNWMRQAPGKGLEWVSYIHYSANEIHYGDSVRGRFTISRDNAKNSLFLQMNSLRVEDTAVYYCVRGGYGDSGRGYWGQGTLVTVSS

SEQ ID NO: 25503 - protein, 97 aa, Homo sapiens
AASGFTFSDYEMNWVRQAPGKGLQWISYIHYSSDNTYYEDSVRGRFTISRDNARNSLSLQMNSLRVEDTAIYYCVRGGYGDSGRGYWGQGTLVTVSS

SEQ ID NO: 25504 - protein, 97 aa, Homo sapiens; identical to SEQ ID NO: 25502

SEQ ID NO: 25505 - protein, 97 aa, Homo sapiens
AASGFTFSNYEMNWVRQAPGKGLEWVSYIHYGATDMYYADAVKGRFTISRDNAKNLLYLQMSSLRAEDTAVYYCVRGGYGDSGRGYWGQGTLVTVSS

SEQ ID NO: 25506 - protein, 96 aa, Homo sapiens
VASGFTFDNYEMNWVRQPPGKGLEWVAYNHYSGTKDYADSVRGRFTISRDNAKNFLFLQMDNLRVEDTGVYYCVRGGYGDSGRGYWGQGTLVTVSS

SEQ ID NO: 25507 - protein, 92 aa, Homo sapiens
AASGVILGVNGMSWVRQAPGMGLKWVADITGGGGTYYAESVEGRFTISRDNSKNTLYLQMNSLRAEDTAVYYCVGHGSSSAWGQGTLVTVSS

SEQ ID NO: 25508 - protein, 93 aa, Homo sapiens
VGSGFPFSGNGMTWARQAPGRGLEWVSDILGRGGRTFYADSVKGRFTMSKDDSKNTVYLQMNNLRANDTAAYYCVGHGSSSAWGQGTQVTVSS

SEQ ID NO: 25509 - protein, 93 aa, Homo sapiens
EASGFTLSNSGMSWVRQAPGKGLEWVSYITISGGNTYYADSVKGRFTISRDIVKNSLFLQMNSLRDEDTAVYYCARGGSLDFWGQGILVTVSS

SEQ ID NO: 25510 - protein, 93 aa, Homo sapiens
AASGFTFSNYEMNWVRQAPGKGLEWISYITSSSNAKYYADSVKGRFTISRDNAENSLYLQLHSLRAEDTAVYYCARGGSLDFWGQGTLVTVSS

SEQ ID NO: 25511 - protein, 93 aa, Homo sapiens; identical to SEQ ID NO: 25510

SEQ ID NO: 25512 - protein, 93 aa, Homo sapiens
AASGFTFSNYEMNWVRQAPGKGLEWISYITSSSNAKYYADSVKGRFTISRDNAENSLYLQLHSLRGEDTAVYYCARGGSLDFWGQGTLVTVSS

SEQ ID NO: 25513 - protein, 93 aa, Homo sapiens; identical to SEQ ID NO: 25510

SEQ ID NO: 25514 - protein, 97 aa, Homo sapiens
ISGDSVSSDGVAWNWIRQSPSRGLEWLGRTYYMSKWYHEYATSVNSRITINPDTSRNQFSLQLNSVTPEDTAVYYCARGRDSSLDFWGQGTLVTVSS

SEQ ID NO: 25515 - protein, 97 aa, Homo sapiens
ISGDSVSSDGVAWNWIRQSPSRGLEWLGRTYYMSKWYHEYAVSVKSRVTINPDTSKNQFSLQLNSVTPEDTAVYYCARGRDSSLDFWGQGTLVTVSS

SEQ ID NO: 25516 - protein, 97 aa, Homo sapiens
ISGDSVSSTGIAWNWIRQSPSRGLEWLGRTYYNSKWVNEYAVSVRGRIDVNADTSKNQFSLHLNSVTPEDTAVYYCARGRDSSLDFWGQGTLVIVSS

SEQ ID NO: 25517 - protein, 97 aa, Homo sapiens; identical to SEQ ID NO: 25516

SEQ ID NO: 25518 - protein, 95 aa, Homo sapiens
AASGFTLSSYWMGWVRQAPGKGLEWVANIKQDGSETYYVDSVKGRFTISRDNAKNSLYLQINSLRAEDTAVYYCARASSSSWSVWGQGTLVTVSS

SEQ ID NO: 25519 - protein, 95 aa, Homo sapiens
AASGFTFSAYWMGWVRQAPGKGLEWVANIKQDGSEKYYVDSVKGRFTISRDNAKNSLYLQVNSLRAEDTAVYYCARASSSSWSVWGQGTLVIVSS

SEQ ID NO: 25520 - protein, 95 aa, Homo sapiens
AASGFTFSSSWMSWVRQAPGKGLEWVANIKQDGSEKYYVDSVKGRFTISRDNAKNSLYLQMNSLRAEDTAVYYCARASSSSWSVWGQGTLVTVSS

SEQ ID NO: 25521 - protein, 98 aa, Homo sapiens
AASGFSFSKYWMHWVRQAPGKGLFWVSHINSDGSSTPYADSVKGRFTISRDNAKNTLYLQMNSLRDEDTAVYYCARGECTSTSCLDHWGQGTLVTVSS

SEQ ID NO: 25522 - protein, 98 aa, Homo sapiens
AASGFTFSKYWMHWVRQVPGKGLMWVSHITTDGSTTTYADSVKGRFTISRDNTKNTLYLQMNSLRAEDTAVYYCARGECTSTSCLDHWGQGTLVTVSS

SEQ ID NO: 25523 - protein, 97 aa, Homo sapiens
AASGFSFSNYEMNWVRQAPGKGLEWVAIIRTSGIPIVYADSVKGRFTISRDNAKNSLYLQMNSLRVDDTAVYYCARGWSAGVHFEYWGQGTLVTVSS

SEQ ID NO: 25524 - protein, 98 aa, Homo sapiens
AASGFSFRNYEMIWVRQPPGKGLEWISYISSGSGSTKYYADSVKGRFTISRDNAKDSLYLQMNILRAEDTAIYYCARGWSAGVHFEYWGQGTLVTVSS

SEQ ID NO: 25525 - protein, 95 aa, Homo sapiens
AASGFIFSSYSMNWVRQAPGKGLEWISYISSSSSSTIFYVDSVKGRFTISRDNAENSLYLQMNSLRDEDTAVYYCARDVGYMDVWGKGTTVTVSS

SEQ ID NO: 25526 - protein, 94 aa, Homo sapiens
AASGFSFRSYEMKWVRQAPGKGLEWVSYISSSGNTIYYADSVKGRFTISRDNAKNSLYLQMNSLRAEDTAVYYCARDVGYMDVWGKGTTVTVSS

SEQ ID NO: 25527 - protein, 97 aa, Homo sapiens
AASGFTFSSYAMSWVRQAPGKGLEWVSLIRSSGADTYYADSVKGRFTISRDNSKNTLYLQMNSLRAEDTAIYYCAKTHGSGWAFDYWGQGTLVTVSS

SEQ ID NO: 25528 - protein, 97 aa, Homo sapiens
AASGFTFSSYALSWVRQAPGKGLHWVSLIKSTTPDTYYADSVKGRFTISRDNSKNTLYLQMNSLRVEDTAVYYCAKTHGSGWAFDYWGQGTLVTVSS

SEQ ID NO: 25529 - protein, 92 aa, Homo sapiens
TFSGGSISSYFWSWIRQPPGKGLEWIGYIYYSGSTNYNPSLKSRVTISLDTSKNQFSLKLTSVTAADTAVYYCARGDPFDFWGQGTLVTVSS

SEQ ID NO: 25530 - protein, 92 aa, Homo sapiens
TFSGGAISSYYWSWIRQAPGKGLEWIGYIYYSGSTNYNPSLESRVTISLDTSKRQFSLNLSSVTAADTAVYYCARGDPFDFWGQGALVTVSS

SEQ ID NO: 25531 - protein, 92 aa, Homo sapiens
AVSGDSISSSRWWTWVRQPPGKGLEWIGEVYHTGDTNYNSSLKGRVTISVDKSHNHFSLNLNYVTAADTAVYYCADPPSGFWGQGTLVTVSS

SEQ ID NO: 25532 - protein, 91 aa, Homo sapiens
VSGESISSSRWWTWVRQSPGRGLEWIGEIYHIGYTNYNSSMKSRVTIAMDKSNNQFSLKLHSMTAADTAIYYCADPPSGFWGQGTLVTVSS

SEQ ID NO: 25533 - protein, 93 aa, Homo sapiens
VSGDSISNRPTNCWNWVRQPPGKGLEWIGEICHSGSPDYNPSLKSRVTISVDKSKNQFFLKLTSVTAADTAVYFCADPPSGFWGQGALVVVSS

SEQ ID NO: 25534 - protein, 93 aa, Homo sapiens
VSGDSMSKRITNCWNWVRQPPGKGLEWIGEVCRSGRPDYNPSLKSRVTISVDKSKNQFFLKLTSVTAADTAVYFCADPPSGFWGQGARVVVSS

SEQ ID NO: 25535 - protein, 93 aa, Homo sapiens
VSGDSISNRPTNCWNWVRQPPGKGLEWIGEVCHSGRPSYSPSLESRVTISVDKSKNQFSLELTSVTAADTAVYFCADPPSGFWGQGTLVTVSS

SEQ ID NO: 25536 - protein, 93 aa, Homo sapiens
VSGDSISDRVTNCWNWVRQPPGKGLEWIGEICHSGSPDYNPSLKSRVTISVDKTKNQFSLKLTSVTAADTAVYFCADPPSGFWGQGALVVVSS

SEQ ID NO: 25537 - protein, 96 aa, Homo sapiens
TVSGGSISTYYWSWIRQPPGKGLEWIGYIYYSGGTNYNPSLKSRLSISVDTSRNQFSLKLTSVTAADTAVYYCARDQGGPYYFDYWGLGTLVTVSS

SEQ ID NO: 25538 - protein, 96 aa, Homo sapiens
TLSGGSISTYYWSWVRQPPGKGLEWIAYIYYSGGTNYNPSLKSRVTISIDTSKNQFSLRLRSVTAADTAVYYCARDQGGPYYFDYWGQGTPVTVSS

SEQ ID NO: 25539 - protein, 104 aa, Homo sapiens
AASGFTFSSYTMSWVRQAPGRGLEWVSSITSSSSYIYYADSVKGRFTISRDDAKNSLYLQMNSLRAEDTAVYYCARDGGYCSGGGCYYYGMDVWGQGTTVSVSS

SEQ ID NO: 25540 - protein, 104 aa, Homo sapiens
AASGFTFSSYTMNWVRQAPGKGLEWVSSIVSSSGYIYYADSLKGRFTVSRDNAKNSVFLQMNSLSAEDTAVYFCARDGGYCSGGGCYYYGMDVWGQGTTVTVSS

SEQ ID NO: 25541 - protein, 99 aa, Homo sapiens
TVSDYFISNGYYWGWIRQPPGKGLEWIGTIYHRGSTYYNPSLQSRGTLSVDTSKNQFSLKLNSVTAADTAVYYCARGTYSSGLNWFDPWGQGTLVTVSS

SEQ ID NO: 25542 - protein, 99 aa, Homo sapiens
TVSGYSISSGYYWGWIRQPPGKGLEWIGSIFHSGSTYYNPSLKSRVTISVDTSKNQFSLKLNSVTAADTAVYYCARGTYSSGLNWFDPWGQGTLVTVSS

SEQ ID NO: 25543 - protein, 93 aa, Homo sapiens
AASAFPFSNAWMRWVRQAPGKGLEWVGRIKSQADGGTTGYAAPVKGRFIISRDDSKDTLYLQMNSLNTEDTAVYYCTDGMAVWGQGTTVTVSS

SEQ ID NO: 25544 - protein, 92 aa, Homo sapiens
ASRFNFNHAWMSWVRQAPGKGLEWVGRIKSKAAGGTPDYPTPVKGRFTISRDDSKNTLYVQMNSLKTEDTAVYYCTDGMAVWGQGTTVTVSS

SEQ ID NO: 25545 - protein, 96 aa, Homo sapiens
SGFTFSAYWMHWVRQAPGKGLEWVSRINGDASARNYARSVEGRFTLSRDNAQNILYLQMNSLRAEDTATYYCARTDTSGREAFDIWGQGTMVTVSS

SEQ ID NO: 25546 - protein, 98 aa, Homo sapiens
AASGFTFSSSWMHWVRQAPGKGLMWVSRIKSDGSTTNYADSVKGRFTISRDNAKNTLYLQMNSLRAEDTAVYYCARTDTSGREAFDIWGQGTMVTVSS

SEQ ID NO: 25547 - protein, 104 aa, Homo sapiens
EGSGFTFSSYWMSWVRQAPGKGLEWVANIKQDGSETYYVDSVKGRFTIYRDNAKSSLYLQMSSLRAEDTALYYCARDCSGGSCYPQYYYGMDVWGQGTTVTVSS

SEQ ID NO: 25548 - protein, 104 aa, Homo sapiens
AASGFTFSSYWMSWVRQAPGKGLEWVANIKQDGSEQYYVDSVKGRFTISRDNAKSSLYLQMNSLRAEDTAVYYCARDCSGGSCYPQYYYGMDVWGQGTTVTVSS

SEQ ID NO: 25549 - protein, 92 aa, Homo sapiens
ASGYIFTNFFLHWVRQAPGQGLEWMGRMNPETGRATYARAFQGRVTMTRDTSTSTGFMELSRLTSADTAVYYCARENYFHPWGQGTLVIVSS

SEQ ID NO: 25550 - protein, 92 aa, Homo sapiens
ASGYIFTNFFLHWVRQAPGQGLEWVGRMNPETGRATYARAFQGRVTMTRDTSTSTGFMELSRLTSADTAVYYCARENYFHPWGQGTLVIVSS

SEQ ID NO: 25551 - protein, 92 aa, Homo sapiens
ASGYTFTNFFIHWVRQAPGQGLEWMGRMNPSTGRATFAQNFRGGVTMTRDTSITTAYMELRNLRSDDTAVYFCARENYFHPWGQGTLVIVSS

SEQ ID NO: 25552 - protein, 92 aa, Homo sapiens
ASGYTFTNFFIHWVRQAPGQGLEWMGRMNPSTGRATFAQNFRGRVTMTRDTSITTAYMELRNLRSDDTAVYFCARENYFHPWGQGTLVIVSS

SEQ ID NO: 25553 - protein, 99 aa, Homo sapiens
GASGFIFSSYSMNWVRQAPGKGLEWVTSISSDNTYIYYGDSVKGRFTISRDNARNSLYLQMNSLRAEDTAVYYCARGPSSDWVNGLDVWGQGTTVTVSS

SEQ ID NO: 25554 - protein, 99 aa, Homo sapiens
EASGFAFTTYSMNWVRQAPGKGLEWVSSISSYSTYIYYTDSLWGRFTISRDNAKNSLYLQLNSLRAEDTAVYYCARGPSSDWVNGLDVWGQGTTVTVSS

SEQ ID NO: 25555 - protein, 99 aa, Homo sapiens
AASGFTFSSYSMNWVRQAPGKGLEWVSFISFSSSYIYYADSVMGRFTISRDNAKNSLYLHMNSLRAEDTAVYYCARGPSSDWVNGLDVWGQGTTVTVSS

SEQ ID NO: 25556 - protein, 93 aa, Homo sapiens
AASGFSFSTYWMSWVRQAPGKGLEWVANIRQDGSVKYYVDSMKGRFTISRDNAENSLYLQMNSLRAEDTAVYYCARGQLLGYWGQGTLVTVSS

SEQ ID NO: 25557 - protein, 93 aa, Homo sapiens
AASGFTFSNFWMSWVRQAPGKGLEWVANIKQDGSAKFYVDSVKGRFTISRDDANNSLYLQMSSLRAEDTAVYYCARGQLLGYWGQGTLVTVSS

SEQ ID NO: 25558 - protein, 101 aa, Homo sapiens
ASGYTFTSYDINWVRQATGHGLEWMGWMNPNSGNTGYAQKFQGRVTMTRNTSISTAYIELSSLRSEDTAVYYCARGPGCISTSCPYYFDYWGQGTLVTVSS

SEQ ID NO: 25559 - protein, 101 aa, Homo sapiens
ASGYTFTNYDINWVRQATGQGLEWMGWMNPNSGNTGYAQKFQGRVTMTRNTSISTAYMELSSLRSEDTAVYYCARGPGCISTSCPYYFDYWGQGTLVTVSS

SEQ ID NO: 25560 - protein, 96 aa, Homo sapiens
TDSTFTFGDYIINWIRQAPGKGLEWVGFINNKANGGTTEYAASVRGRFTISRDDSKSIAYLQMNSVKIDDTAVYYCTRGHYSGPSWGQGTLVTVSS

SEQ ID NO: 25561 - protein, 96 aa, Homo sapiens
RDFDFSFGNFIISWVRQAPGKGLEWVGFIRNRASGGTTEYAASVQGRFTISRDDSARIAYLHMDSLRTEDTGIYYRTRGHYSGPSWGPGTPVTVSS

SEQ ID NO: 25562 - protein, 96 aa, Homo sapiens
TVSGFTMGDYIMNWVRQAPGKGLEWVGFIKKSADGGTTEYAASVRGRFTISRDDSKSVAYLQMNTLKTDDTGTYYCTRGHYSGPSWGQATLVTVAS

SEQ ID NO: 25563 - protein, 94 aa, Homo sapiens
AASGFSFYNYYMAWVRQAPGKGLEWVANIKEDGSEKYYVDSVKGRFTISRDSAKNSLYLQINSLRDEDTAVYFCARGGWFFDLWGRGTLVTVSS

SEQ ID NO: 25564 - protein, 94 aa, Homo sapiens
AASGFTFNDHWMSWVRQAPGEGLEWVAKIKQDGSDTYYVDSVKGRFTISRDNAKNSLYLQMNSLRVADTAVYYCARGGWFFDLWGRGALVTVSS

SEQ ID NO: 25565 - protein, 100 aa, Homo sapiens
AASGFTFKNYGMHWVRQAPGKGLEWVAVIWSDGNKKYYADSVKGRFTISRDTFENTVYLQMNRLSDEDTAVYYCARDVDTTSHYGWFDPWGQGTLVTVSS

SEQ ID NO: 25566 - protein, 100 aa, Homo sapiens
ATSGFTFTNYGMHWVRQAPGKGLEWVAVLWADGNRKYYVDSVKGRFTVSRDNSKTTQYLQMNSLRVEDTAVYYCARDVDTTSHYGWFDPWGQGTLVTVSS

SEQ ID NO: 25567 - protein, 92 aa, Homo sapiens
TVSGGSISSGTYKWNWIRQPAGKGLEWIGHIYTTGSTNYNPSLKSRVTISIDTSKNQFSLKLSSVTAADTAVYYCARGAGAYWGQGTLVTVS

SEQ ID NO: 25568 - protein, 93 aa, Homo sapiens
TVSGGSISSGGHHWSWIRQPAGKGLEWIGRIGAGGSTKYSPSLESRVTISIDTSKNQFSLKLTSVTVADTAVYYCARGAGAYWGQGALVTVSS

SEQ ID NO: 25569 - protein, 93 aa, Homo sapiens; identical to SEQ ID NO: 25568

SEQ ID NO: 25570 - protein, 93 aa, Homo sapiens
TVSGGSVSDESYYWSWIRQPPGKGLEWIGYIYYSGSPNYNPSLKSRVTISIDTSKNHFSLKLRSVTAADTAVYYCARGAGAYWGQGTLVTVSS

SEQ ID NO: 25571 - protein, 93 aa, Homo sapiens
TVSGGSVSDDSYYWSWIRQPPGKGLEWIGYIYYSGSPNYNPSLKSRVTMSIDTSKNHFSLKLRSVTAADTAVYYCARGAGAYWGQGTLVTVSS

SEQ ID NO: 25572 - protein, 92 aa, Homo sapiens
VSGGSVSDESYYWSWIRQPPGKGLEWIGYIFYSGSPKYNPSLKSRVTISIDTSKNHFSLKLRSVTAADTAVYYCARGAGAYWGQGTLVTVSS

SEQ ID NO: 25573 - protein, 93 aa, Homo sapiens
TVSGGSVSSGSYYWSWIRQPPGKGLEWIGYIYDSGSTDYNPSLKSRVTISVDTSKNQFSLKLTSVTAADTAVYYCARGAGAYWGQGTLVTVSS

SEQ ID NO: 25574 - protein, 93 aa, Homo sapiens; identical to SEQ ID NO: 25571

SEQ ID NO: 25575 - protein, 93 aa, Homo sapiens; identical to SEQ ID NO: 25571

SEQ ID NO: 25576 - protein, 93 aa, Homo sapiens
TVSGGSVSDESCYWSWIRQPPGKGLEWIGYIYYSGSPNYNPSLKSRVTISIDTSKNHFSLKLRSVTAADTAVYYCARGAGAYWGQGTLVTVSS

SEQ ID NO: 25577 - protein, 93 aa, Homo sapiens
TVSGGSVSDESYYWSWIRQPPGKGLEWIGYIYYSGSPNYNPSLKSRVTISIDTSKNHFSLKLRSVTAADTAVYYCARGAGAYWGQGTLVTASS

SEQ ID NO: 25578 - protein, 93 aa, Homo sapiens
TVSGGSVSDESYYWSWIRQPPGKGLEWIGYIYYSGSPNYNPSLKSRVTMSIDTSKNHFSLMLRSVTAADTAVYYCARGAGAYWGQGTLVTVSS

SEQ ID NO: 25579 - protein, 96 aa, Homo sapiens
AASKFVFSDYYMSWIRRAPGKGLEWVSYITTAGAVFYADSVKGRFTVSRDNARNSLYLQMTSLRAEDTAVYYCARFGGSGWSLDYWGQGTLVTVSS

SEQ ID NO: 25580 - protein, 98 aa, Homo sapiens
AASGFTFSDYYMSWIRQAPGKGLEWVSYISSTSGSTIYYADSVKGRFTISRDNAQNSLYLQMNSLRAEDTAVYYCARFGGSGWSLDYWGQGTLVTVSS

SEQ ID NO: 25581 - protein, 97 aa, Homo sapiens
EASRFTFSDYYMSWVRQAPGKGLEWVSYITSTSTYTNYADSVKGRFTISRDNAKNSLYLQMNSLRAEDTAVYYCARFGGSGWSLDYWGQGTLVTVSS

SEQ ID NO: 25582 - protein, 97 aa, Homo sapiens
AASQFIFSDYYMSWIRQAPGKGLEWVSYISSSGTTTYYADSVKGRFTISRDNARHSLYLQMNSLRGEDTAVYYCARFGGSGWSLDYWGQGSLVTVSS

SEQ ID NO: 25583 - protein, 92 aa, Homo sapiens
ASGFIFSTYAMAWVRQAPGKGLEWISSITPNGAATYYADSVKGRFTISRDNSKDTLYLQMNSLRAEDTAVYYCANSRNFDYWGQGTLVTVSS

SEQ ID NO: 25584 - protein, 93 aa, Homo sapiens
AASGFTFSNYAMTWVRQAPGKGLEWVSSIGHGSVTTSYADAVKGRFTISRDNTKKTLYLQMNSLRPEDTAVYYCANSRNFDYWGQGTLVTVSS

SEQ ID NO: 25585 - protein, 99 aa, Homo sapiens
AASGFNFNKYAIHWVRQAPGKGLEWVAVISNDGINKYYADSVTGRFTISRDNSRNTLYLQMNSLRVEDTAVYWCARAIFGVVRDASDIWGQGTMVTVSS

SEQ ID NO: 25586 - protein, 99 aa, Homo sapiens
AASGFTFSRYAMHWVRLAPGKGLEWVAVISYDGNTEYYIDSVKGRFTISRDNSKNILYLQMNSLNTEDTAVYYCARAIFGVVRDASDIWGQGTMVTVSS

SEQ ID NO: 25587 - protein, 96 aa, Homo sapiens
AASGFTFSNYWMDWVRQAPGKGLVWVSRMSSDGSSTSYADSVKGRFTISRDNAKNTLYLQMNSLRAEDTAVYYCARDLVGATADYWGQGTLVTVSS

SEQ ID NO: 25588 - protein, 96 aa, Homo sapiens
VASGFTFTTYWMHWVRQAPGKGLVWVSRINIDASSTFYADSVKGRFTISRDNAENTVYLQMNNLRVEDTAVYHCARDLVGATADYWGQGILVTVSS

SEQ ID NO: 25589 - protein, 94 aa, Homo sapiens
TVSGGSISSSYWSWIRQPPGKGLEWIGYISDSGSTNYNPSLQSRVTISVDTSKNQFSLKLSSVTAADTAVYFCARGSTNWYDPWGQGTLVTVSS

SEQ ID NO: 25590 - protein, 94 aa, Homo sapiens
TVSGGSISSHYWSWIRQPPGKRLEWIGYIYYSGNINYNPSLKSRVTISVDTSKNQVSLKLTSVTAADTAVYYCARGSTNWYDPWGQGTLVTVSS

SEQ ID NO: 25591 - protein, 98 aa, Homo sapiens
SVSGDSISNTDYYWDWIRQPPGKGLEWIGTIYYSGITFYNPSLRSRVTIFVDTPNHQFSLDLNSVTAEDTGLYYCARRRGGHDYFDSWGQGTLVRVSS

SEQ ID NO: 25592 - protein, 98 aa, Homo sapiens
TVSGGSISSNDNCWDWIRQPPGKGLEWIGSIYYRGSTYYNPSLKSRVTISIDTSKNQLSLKLNSVTAADMAVYYCARRRGGHDYFDSWGQGTLVTVSS

SEQ ID NO: 25593 - protein, 93 aa, Homo sapiens
AASGFTFSNYAMAWVRQAPGKGLEWVSLVGNSGGATYYADSVKGRFTISRDNSMNTLYLQMNSLRAEDTAIYYCAKDRSFGYWGQGTLVTVSS

SEQ ID NO: 25594 - protein, 92 aa, Homo sapiens
AASGFTFSNSAMSWARQAPGKGLEWVSTSGTGGNTYYAVSVRDRFSISRDNSKNMLFLQMNSLRAEDTAVYYCAKDRSFGYWGQGTLVTVSS

SEQ ID NO: 25595 - protein, 93 aa, Homo sapiens
AASGFTFSTYWMHWVRQVPGKEPVWVSRINTNGSSTSYVDSVKGRFTISRDNTNNMLYLQMNSLTVADTAVYYCARGVTSGFWGQGTLVTVSS

SEQ ID NO: 25596 - protein, 93 aa, Homo sapiens
AASGFSFSSYWMHWVRQAPGKGLMWVSRINSDGSTVSYADSLKGRFTTSRDNAKNTLYLQMNSLRAEDTAVYYCARGVTSGFWGQGTLVTVSS

SEQ ID NO: 25597 - protein, 97 aa, Homo sapiens
AASGFTFSAAWMSWVRQAPGKGLEWVGHIRSKIDGGTTDYAAPVKGRFTISRDDSENNLYLQMSSLKTDDTAVYYCTTEYWGALNNWGHGILVTVSS

SEQ ID NO: 25598 - protein, 97 aa, Homo sapiens
AASGFIFSNAWMSWVRQAPGKGLEWVGRIKSRADGGTTEYAAPVKGRLTISRDDSKNTLYLQMNSLKSEDTAVYYCTTEYWGALNNWGQGTLVTVSS

SEQ ID NO: 25599 - protein, 97 aa, Homo sapiens
AASGFTFSAAWMSWVRQAPGKGLEWVGQIKSKVDGGTTEYAAPVKGRFTISRDDSENNLYLQMSSLKTDDTAVYYCTTEYWGALNNWGQGILVTVSS

SEQ ID NO: 25600 - protein, 96 aa, Homo sapiens
AASGFTFSIYDMHWVRQVTGEGLEWVSAIGTTGDTYYAGSVKGRFTISRENAKNSLYLQMNSLSAGDTAVYYCARGGMVQGDIDYWGQGTLVSVSS

SEQ ID NO: 25601 - protein, 96 aa, Homo sapiens
AASGFTFSIYDMHWVRQVTGEGLEWVSAVGTTGDTYYAGSVKGRFTISRENAKNSLYLQMNSLSAGDTAVYYCARGGMVQGDIDYWGQGTLVSVSS

SEQ ID NO: 25602 - protein, 96 aa, Homo sapiens
AASGFTFSTHDMHWVRQATGKGLEWVSAIYTTGDTYYRGSVKGRFTISREVASNSLYLQMNTLGAGDTAVYYCARGGMVQGDIDYWGQGTLVTVSS

SEQ ID NO: 25603 - protein, 96 aa, Homo sapiens
AASGFIFNNYDMHWVRQATGKGLEWVSAIHTTGDTYYSDSVKGRFTISRDNAKNSFYLQMNSLRDGDTAVYYCARGGMVQGDIDYWGQGTLVTVSS

SEQ ID NO: 25604 - protein, 96 aa, Homo sapiens
AASGFIFSNYDMHWVRQATEKGLEWVSAIHTTGATYYADSVKGRFTISRDNARNSFHLQMNSLRAGDTAVYYCARGGMVQGDIDYWGQGTLVTVSS

SEQ ID NO: 25605 - protein, 96 aa, Homo sapiens
AASGFIFSNYDMHWVRQATEKGLEWVSAIHTTGATYYADSVKGRFTISRDNARNSFYLQMNSLRAGDTAVYYCARGGMVQGDIDYWGQGTLVTVSS

SEQ ID NO: 25606 - protein, 96 aa, Homo sapiens
AASGFIFSNYDMHWVRQATGKGLEWVSAIHTTGDTYYSGSVKGRFTISRENAKNSFYLQMNSLRDGDTAVYYCARGGMVQGDIDYWGQGTLVAVSS

SEQ ID NO: 25607 - protein, 96 aa, Homo sapiens
AASGFTFSIYDMHWVRQVTGEGLEWVSAIATTGDTYYADSVRGRFTISRENAKNSFYLQMNSLNAGDTAVYYCARGGMVQGDIDYWGQGTLVSVSS

SEQ ID NO: 25608 - protein, 96 aa, Homo sapiens; identical to SEQ ID NO: 25605

SEQ ID NO: 25609 - protein, 96 aa, Homo sapiens
AASGFIFSNYDMHWVRQATGKGLEWVSAIHTTGDTYYADSVKGRFTISRENARNSFYLQMNSLRAGDTAVYYCARGGMVQGDIDYWGQGTLVTVSS

SEQ ID NO: 25610 - protein, 96 aa, Homo sapiens
AASGFIFSNYDMHWVRQATGKGLEWVSAIHTTGDTYYADSVKGRFTISRENAKNSLYLQMNSLRAGDTAVYYCARGGMVQGDIDYWGQGTLVTVSS

SEQ ID NO: 25611 - protein, 96 aa, Homo sapiens; identical to SEQ ID NO: 25606

SEQ ID NO: 25612 - protein, 96 aa, Homo sapiens
AASGFIFSNYDMHWVRQATGEGLEWVSAIHTTGDTYYAGSAKGRFTISRENAKNSFYLQMYSLRAEDTAVYYCARGGMVQGDIDYWGQGTLVTVSS

SEQ ID NO: 25613 - protein, 96 aa, Homo sapiens
AASGFIFSNYDMHWVRQATGEGLEWVSAIHTTGETYYADSVKGRFTISRENARNSFYLQMNSLRAGDTAVYYCARGGMVQGDIDYWGQGTLVTVSS

SEQ ID NO: 25614 - protein, 101 aa, Homo sapiens
AASGFTFADYPMSWVRQAPGKGLEWVSATGGNGVGTFYTDSVKGRFTISRDNSKNTLYLQMDSLRAEDSAMYFCAKDRGLGDDHGDYFDYWGQGTLITVSS

SEQ ID NO: 25615 - protein, 101 aa, Homo sapiens
VASGFGFSIYPMSWVRQAPGKGLEWVSAISQNGRGTFYTDSVKGRFTISRDNSKNTLYLHMNSLRAEDTAIYYCAKDRGLGDDHGDYFDYWGQGTLVTVSS

SEQ ID NO: 25616 - protein, 94 aa, Homo sapiens
VVSGFTFSSYWMSWVRQTPDKRLEWVATTNEDEREKYYVDSVKGRFTIYRDNTRNSVFLQMDILRAEDTALYFCARLTNYFDYWGEGTLVTVSS

SEQ ID NO: 25617 - protein, 94 aa, Homo sapiens
AASGFTFSSYWMSWVRQAPGKGPEWVATMNRDGSQKLYLDSVKGRFTISRDNAKNSLSLQMNSLRADDTAVYYCARLTNYFDYWGQGTLVTVSS

SEQ ID NO: 25618 - protein, 94 aa, Homo sapiens; identical to SEQ ID NO: 25617

SEQ ID NO: 25619 - protein, 94 aa, Homo sapiens
VVSGFTFSSYWMSWVRQTPDKRLEWVATTNEDEREKYYVDSVKGRFTIYRDNARNSVFLQMDILRAEDTALYFCARLTNYFDYWGEGTLVTVSS

SEQ ID NO: 25620 - protein, 98 aa, Homo sapiens
TVSGGSISSSSYYWGWIRQPPGKGLEWIGSIYYSGSTYYNPSLKSRVTVSVDTSKSQFSLKLSSVTAADTAVYYCARRGYSYGFFNYWGQGTLVTVSS

SEQ ID NO: 25621 - protein, 98 aa, Homo sapiens
TVSGGSISSSSYYWGWIRQPPGKGLEWIGSICYTGNIYYNPSLRSRVTISVDTSKNQFSLKLDSVSAADTAVYYCARRGYSYGFFNYWGQGTLVTVSS

SEQ ID NO: 25622 - protein, 96 aa, Homo sapiens
AASGFTFSRYWMEWVRQAPGKGLEWVANIKEGASAKNYVDSVKGRFTISRDNAENSLYLQINSLRAEDTAVYYCARNLGWQQFDYWGQGTLVTVSS

SEQ ID NO: 25623 - protein, 95 aa, Homo sapiens
ASGFTFSTYWMDWVRQAPGKGLEWVANIQEDGSSENYVDSVKGRFTISRDNAKNLVYLQMNSLSAEDTAVYYCARNLGWQQFDYWGQGALVTVSS

SEQ ID NO: 25624 - protein, 90 aa, Homo sapiens
AASGLTFSHYNIHWVRQAPGKGLEWVALIYYDGIEKYYEDSVKGRFTISRDNSKNTLYLQMNSLRVEDTAVYYCTNYQYWGQGTLVTVSS

SEQ ID NO: 25625 - protein, 90 aa, Homo sapiens
AASGLTFSSYNIHWVRQAPGKGLEWVALIYHDGNDKYHADSVKGRFTISRDNSKNTLYLQMNSLRAEDTAVYYCTNYQYWGQGTLVTVSS

SEQ ID NO: 25626 - protein, 90 aa, Homo sapiens
AASGLTFSNYNIHWVRQAPGKGLEWVALIYYDGINKYYADSVKGRFTISRDNSKNTLYLQMNSLRAEDTAVYYCTNYQYWGQGTLVTVSS

SEQ ID NO: 25627 - protein, 90 aa, Homo sapiens
EVSGLTFSNYNIHWVRQAPGRGLEWVALIYYDGINKYHADSVKGRFTISRDNSKNTLYLQMNSLRAEDTAVYYCTNYQYWGQGTLVTVSS

SEQ ID NO: 25628 - protein, 94 aa, Homo sapiens
TVSNGSINTYYWTWIRQPPGKGLEWIGYIYYSGSTSYNPSLKSRVIISVDTSKNQFSLKLSSVTAADTAVYYCARLGSGSCRDWGQGTLVTVSS

SEQ ID NO: 25629 - protein, 94 aa, Homo sapiens
TVSGGSISTYSWSWIRQPPGKGLEWIGYFHSSGSTNYNPSLKSRVTISVDTSNNQLSLKLSSVTAADTAVYYCARLGSGSCRDWGQGTLVTVSS

SEQ ID NO: 25630 - protein, 90 aa, Homo sapiens
AASGFTFSDYAMHWVRQAPGKGLEWVAVISYDGSNQYYADSVKGRFTISRDNSKNTLYLQVNSLRAEDTAIYFCGRFDYWGQGTLVTVSS

SEQ ID NO: 25631 - protein, 90 aa, Homo sapiens
AASGFTFRNYAMHWVRQAPGKGLEWVAVISYDGSNKYNADSVKGRFTISRDNSKNTLFLQMNSLRVEDTAVYYCGRFDYWGQGTLVTVSS

SEQ ID NO: 25632 - protein, 96 aa, Homo sapiens
ASGFTFGDYTMSWFRQAPGKGLEWIGFIRSKGYGGTTQYAASVKGRFTISRDDSKSIAYLQMSSLKTDDTAIYYCHGSSWNWFDPWGRGTLVTVSS

SEQ ID NO: 25633 - protein, 97 aa, Homo sapiens
TASGFTFGDYAMSWVRQAPGKGLEWVGFIRIKAYGGTPEYAASVKGRFTISRDDSKSIAYLQMNSLKTEDTAVYYCHGSSWNWFDPWGQGTLVTVSS

SEQ ID NO: 25634 - protein, 97 aa, Homo sapiens
TASGFTFSDYTMSWFRQAPGKGLEWVGFIRSQAYGGTTEYAASVKGRFTISRDDSKSIAYLQMNSLKTEDTAVYYCHGSSWNWFDPWGQGTLVTVSS

SEQ ID NO: 25635 - protein, 97 aa, Homo sapiens
AATGFTVSNYWMSWVRLAPGKGLEWVANINEDGSEKNYIDSVEGRFTISKDNAQNSLSLQMTSLRAEDTAEYFCARGGGSGWPFAYWGQGTLVTVSS

SEQ ID NO: 25636 - protein, 96 aa, Homo sapiens
AATGFTVSNYWMSWVRLAPGKGLEWVANINEDGSEKNYIDSVEGRFTISKDNAQNSLSLQMTSLRAEDTAEYFCARGGGSGWPFAYWGQELWSPSP

SEQ ID NO: 25637 - protein, 97 aa, Homo sapiens; identical to SEQ ID NO: 25635

SEQ ID NO: 25638 - protein, 97 aa, Homo sapiens
AASGFSFSDSWMSWVRQAPGKGLEWVANINQRGSEENYVDSVKGRFSISRDNAKNAMYLQMNSLRAEDTAVYYCARGGGSGWPFAYWGQGALVTVSS

SEQ ID NO: 25639 - protein, 102 aa, Homo sapiens
AASGFTFDDYAMHWVRQAPGKGLEWVSLISGDGAGTYYADSVKGRFTISRDNSKHSLYLQMNSLRTEDTALYYCAKDRYCSGGNCYSPFDYWGQGTLVTVSS

SEQ ID NO: 25640 - protein, 102 aa, Homo sapiens
AASGFNLEDYVMHWVRQAPGKGLEWVSLISADGSSTFYTDSVRGRFTISRDNSENSLYLQMNSLRTEDTALYYCAKDRYCSGGNCYSPFDYWGQGTLLTVSS

SEQ ID NO: 25641 - protein, 95 aa, Homo sapiens
AASGFTLSNYAMQWVRQAPGKGLEYVSSISNDGSRTYYVNSVKGRFTVSRDNSNNMLYLQVGSLRPEDMGVYFCARDDIGSYDCWGQGALVTVSS

SEQ ID NO: 25642 - protein, 94 aa, Homo sapiens
AASGFTLTDYSIQWVRQAPGKGLEYISTITSEGGSSYANSVKGRFTISRDISKNTVFLQMGSLTTEDTAMYYCARDDIGSYDCWGQGTLVTVSS

SEQ ID NO: 25643 - protein, 94 aa, Homo sapiens
AASGFILSDYAIQWVRQAPGKGLEYIATIKSSGDRMFANSVKGRFSISRDNSKNTLYLEMGSLRPEDTAMYYCARDDIGSYDCWGQGTLVTVSS

SEQ ID NO: 25644 - protein, 95 aa, Homo sapiens
AAYGFSLNSYAIQWVRQVPGKGLEYVSTISASGDTTAYARSVKGRFTISRDIFKNIVYLQMGSLRTEDTAMYYCARDDIGSYDCWGQGTLVTVSS

SEQ ID NO: 25645 - protein, 95 aa, Homo sapiens
EGSGFTFSHYYMTWIRQAPGKGLDWVAYIDPSGSPIYYADSVKGRFTVSRDNAKNSLYLQMTSLRGDDTAVYFCARDPVGTPVYWGQGARVTVSS

SEQ ID NO: 25646 - protein, 95 aa, Homo sapiens
AASGFTFRDYYMTWIRQAPGKGLEWVSFISSDGTTIYYADSVRGRFTVSRDNAKRSLFLQMNSLRAEDTAVYYCARDPVGTPVYWGQGTLVTVSS

SEQ ID NO: 25647 - protein, 93 aa, Homo sapiens
AASGFIFSGSWMSWVRQAPGKGLEWVANIKPDGSETNYVDSVKGRFTISRDNPKNSLYLQMNSLRAEDTAVYYCARNRGISHWGQGTLVTVSS

SEQ ID NO: 25648 - protein, 93 aa, Homo sapiens; identical to SEQ ID NO: 25647

SEQ ID NO: 25649 - protein, 93 aa, Homo sapiens
AASGFTFSDNWMTWVRQAPGKGLEWVANIKHDGSEVNYVDSVKGRFTISRDNAKSSLYLQMNSLRVEDTAVYYCARNRGISHWGQGTLVTVSS

SEQ ID NO: 25650 - protein, 93 aa, Homo sapiens
AASGFTFSGSWMNWVRQAPGKGLEWVANIKTDGSETYFVDSVKGRFTISRDNPKNSLYLQMNSLRADDTAVYYCARNRGISHWGQGTLVTVSS

SEQ ID NO: 25651 - protein, 93 aa, Homo sapiens; identical to SEQ ID NO: 25649

SEQ ID NO: 25652 - protein, 93 aa, Homo sapiens
AASGFTFSDSWMNWVRQAPGKGLEWVANIKHDGSEVNYVDSVKGRFTISRDNAKSSLYLQMNSLRVEDTAVYYCARNRGISHWGQGTLVTVSS

SEQ ID NO: 25653 - protein, 97 aa, Homo sapiens
AASGFTFSSYWFHWLRQSPGKGLVWVSRVNTDGSITNYADSVRGRFTISRDDAKNTLYLQMNSLSAEDTAVYFCVRGTNGWPGIDYWGQGTLVTVSS

SEQ ID NO: 25654 - protein, 97 aa, Homo sapiens
AASGFTFSNYWMHWVRQAPGEGLVWVSRIDIDGTNTNYADSVRGRFTISRGDAKNTLYLQMNSLRAEDTAVYYCVRGTNGWPGIDYWGQGTLVTVSS

SEQ ID NO: 25655 - protein, 97 aa, Homo sapiens
AAPGFTFSTFGMHWVRQAPGKGLEWVAVIWSNGGNIYYSDSVKGRFTISRDNSKNTLYLQMNSLRAEDTAVYYCARDLRKGLYMDVWGKGTTVTVSS

SEQ ID NO: 25656 - protein, 97 aa, Homo sapiens
AASGFTFSAAGMHWVRQAPGKGLEWVAIIWYDGSKIYYADSVKGRFTISRDNSKNTLYLQMDSLRAEDTAVYYCARDLRKGLYMDVWGKGTTVTVSS

SEQ ID NO: 25657 - protein, 97 aa, Homo sapiens
AASGFTFSTQGMHWVRQAPGKGLEWVAIIWYDGSKKEYADSVKGRFTISRDNPKNTLYLQMDSLRAEDTAVYYCARDLRKGLYMDVWGKGTTVTVSS

SEQ ID NO: 25658 - protein, 99 aa, Homo sapiens
AASGFTFSSYAMHWVRQTPGKGLEWVAVIAYDGGLKFYADSVKGRFTISRDDSKNTLYLQMNSLRAEDTARYYCARDMFRGIPDYLDYWGQGTLVTVSS

SEQ ID NO: 25659 - protein, 99 aa, Homo sapiens
AASGFTFGHYAFHWVRQAPGKGLEWVAVISYNGDTTFYADSVKGRFTISRDDPKNTLNLQMYSLRAEDSAVYYCARDMFRGIPDYLDYWGQGTLVTVSS

SEQ ID NO: 25660 - protein, 99 aa, Homo sapiens
AASGYAFSRYAMHWVRQAPGKGLEWVSVIAYDGTIKYYADSVKGRFTISRDDSSNTLYLQMNSLRSDDTAVYYCARDMFRGIPDYLDYWGQGTLVTVSS

SEQ ID NO: 25661 - protein, 99 aa, Homo sapiens
AASGFTFSDYAFHWVRQAPGQGLQWVAVISYDGKVQFYADSVRGRFTIFRDSPSHTLYLQMTSLRVDDTAVYYCARDMFRGIPDYLDYWGQGTLVTVSS

SEQ ID NO: 25662 - protein, 94 aa, Homo sapiens
AASGFTFGDASMTWVRQAPGKGLEWVGRIKRRTDGATTDYAAPVKGRFTISRDDSKNTLYVQMNSLNTEDTAVYYCATGGLRNWGQGTLVTVSS

SEQ ID NO: 25663 - protein, 94 aa, Homo sapiens
ATSGFTFSDAWMTWVRQAPGKGLEWVGRIKSKTDGGTADYTAPVKGRFTISREDSQNTLYLQMNSLKTEDTGVYYCATGGLRNWGQGTVVTVSS

SEQ ID NO: 25664 - protein, 96 aa, Homo sapiens
AASGFTFTYYSMNWVRQAPGKGLEWLSYINSGSDNIYHADSVKGRFTISRDNAKSSLYLQMSSLRDEDTAVYYCARKLGNDAFDIWGQGTMVTVSS

SEQ ID NO: 25665 - protein, 96 aa, Homo sapiens
AASGFTFSYYSMNWVRQAPGKGLEWVSYISSSSSIIYYADSVKGRFTISRDNAKNSLYLQMNSLRDEDTAVYYCARKLGNDAFDIWGQGTMVTVSS

SEQ ID NO: 25666 - protein, 94 aa, Homo sapiens
ASGYIFTIYGVSWLRQAPGQGLEWMGWIRAHNGDTEYAQEFQGRVTMTTDASTSTAYMELRSLRSDDTAVYYCARSPYWYFDLWGRGTLVTVSS

SEQ ID NO: 25667 - protein, 92 aa, Homo sapiens
ASGYIFNIYGISWVRQAPGQGLEWVGWIRAHTGDTNYAQKFQGRVTMTTDTSTNTAYMELMTLRPDDTAVYYCARSPYWYFDLWGRGTLVTV

SEQ ID NO: 25668 - protein, 96 aa, Homo sapiens
AASGFTFDDYGMHWVRQAPGKGLEWVSGIRWDSGSIGYADSVKGRFTISRDNAKNSLSLQMNSLRADDTALYYCARRDQPGAFDIWGQGTMVTVSS

SEQ ID NO: 25669 - protein, 96 aa, Homo sapiens
AASGFTFDDSAMHWVRQAPGKGLEWVSGISWNSGSIVYADSVKGRFSISRDNAKNSLYLQMNSLRAEDTALYYCARRDQPGAFDIWGQGTMVTVSS

SEQ ID NO: 25670 - protein, 95 aa, Homo sapiens
AASGFTFSSYWMGWFRQAPGKGLECVANVNQDGTKKYYVDSVKGRFTISKDNAENSLLLQMNSLRVEDTAVYYCARLVTHTSDYWGQGTLVTVSS

SEQ ID NO: 25671 - protein, 95 aa, Homo sapiens
AASGFSFSTYWMGWVRQTPGKGLECVANINQDGSEKYYVDSVKGRFTISRDNAKNSLYLQVSSLRAEDTALYYCARLVTHTSDYWGQGTLVTVSS

SEQ ID NO: 25672 - protein, 98 aa, Homo sapiens
KGSGYNFANYWIAWVRQMPGKGLEWMGVIYPGDSDTRYGPSFQGQVTISADKSTSTAYLQWNSLKASDTGIYYCARRGYSSSSDGMDVWGQGTTVTVS

SEQ ID NO: 25673 - protein, 99 aa, Homo sapiens
KGSGYSFTNYWIVWVRQMPGKGLEWMGIIYAGDSDSRYSPSFEGQVIISGDKSISTAYLQWSSLKASDTAMYYCARRGYSSSSDGMDVWGQGTTVTVSS

SEQ ID NO: 25674 - protein, 99 aa, Homo sapiens; identical to SEQ ID NO: 25673

SEQ ID NO: 25675 - protein, 99 aa, Homo sapiens
KGSGYRFTNYWIGWVRQMPGKGLEWMGMIYPEDSETRYSPSFQGQVTISADKSSSTAYLQWSSLKASDTAMYYCARRGYSSSSDGMDVWGQGTTVTVSS

SEQ ID NO: 25676 - protein, 99 aa, Homo sapiens
KGSGYRFTNYWIGWVRQMPGKGLEWMGMIYPEDSETRYSPSFQGQVTISADKSISTAYLQWSSLKASDTAMYYCARRGYSSSSDGMDVWGQGTTVTVSS

SEQ ID NO: 25677 - protein, 99 aa, Homo sapiens
KGSGYSFTNYWIGWVRQMPGKGLEWMGIIYAGDSDSRYSPSFEGQVIISGDKSISTAYLQWSSLKASDTAMYYCARRGYSSSSDGMDVWGQGTTVTVSS

SEQ ID NO: 25678 - protein, 99 aa, Homo sapiens
KGSGYNFANYWIGWVRQKPGKGLEWMGIIYPGDSDPRYSPSFQGQVTISGDKSISTAYLQWSSLKASDTAMYYCARRGYSSSSDGMDVWGQGTTVTVSS

SEQ ID NO: 25679 - protein, 99 aa, Homo sapiens; identical to SEQ ID NO: 25677

SEQ ID NO: 25680 - protein, 99 aa, Homo sapiens
KGSGYSFTNYWIGWVRQMPGKGLEWMGMIYPGDSESRYSPSFQGQVTISADKSISTAYLQWSSLKASDTAIYYCARRGYSSSSDGMDVWGQGTTVTVSS

SEQ ID NO: 25681 - protein, 99 aa, Homo sapiens
KGSGYRFTNYWIGWVRQMPGKGLEWMGIIYPGDSESRYSPSFEGQVTISADKSISTAYLQWSSLKASDTAMYYCARRGYSSSSDGMDVWGQGTTVTVSS

SEQ ID NO: 25682 - protein, 99 aa, Homo sapiens
KGSGYRFTNYWIGWVRQMPGKGLEWMGIIYPDDSDTRYSPSFQGQVTISADKSISTAYLQWSSLKASDTAMYYCARRGYSSSSDGMDVWGQGTTVTVSS

SEQ ID NO: 25683 - protein, 99 aa, Homo sapiens
KGSGYRFTNYWIVWLRQMPGKGLEWMGIIYPDDSETRYSPSFQGHVTISADKSISTAYLQWSSLKASDTAMYYCARRGYSSSSDGMDVWGQGTTVTVSS

SEQ ID NO: 25684 - protein, 99 aa, Homo sapiens
KGSGYRFTNYWIGWVRQMPGKGLEWMGTIYPSDSETRYSPSIQGQVTITADKSISTAYLQWSSLKASDTAMYYCARRGYSSSSDGMDVWGQGTTVTVSS

SEQ ID NO: 25685 - protein, 92 aa, Homo sapiens
AASGFTFASHDMTWVRQAPGKGLEWVSFIKGGGDHTDYPDSVKGRFTISRDISKTTLYLQMNSLRAEDTALYYCVRGHFASWGQGTLVTVSS

SEQ ID NO: 25686 - protein, 90 aa, Homo sapiens
SGFILRDKDISWVRQAPGKGLEWVSFINVAGSGTYYADSVKGRFTISRDDSKNTLFLQMNSLRVEDTAIYYCVRGHFASWGQGTLVTVSS

SEQ ID NO: 25687 - protein, 90 aa, Homo sapiens
SGFILRDKDISWVRQAPGKGLEWVSFINVAGSGTYYADSVKGRFTISRDDSKNTLFLQMNRLRVEDTAIYYCVRGHFASWGQGTLVTVSS

SEQ ID NO: 25688 - protein, 90 aa, Homo sapiens
SGFILRDKDISWVRQAPGKGLEWVSFINVAGSGTYYADSVKDRFTISRDDSKNTLFLQMNSLRVEDTAIYYCVRGHFASWGQGTLVTVSS

SEQ ID NO: 25689 - protein, 96 aa, Homo sapiens
AASGFTFSDYWMGWVRQSPGKGLEWVANIKEDGGEIYYVDSVKGRFTISRDNAKNSLYLQMNRLRVEDTAVYYCARVRGKGWFDPWGQGTLVTVSS

SEQ ID NO: 25690 - protein, 96 aa, Homo sapiens
AASGFTFSDYWMGWVRQAPGKGLEWVANMKEDGNEKYYVDSVKGRFTISRDNAKKSLNLQMNSLRAEDTAVYYCARVRGKGWFDPWGPGTLVTVSS

SEQ ID NO: 25691 - protein, 96 aa, Homo sapiens
AASGFTFSDYWMGWVRQAPGKGLEWVANIKEDGNEKYYVDSVKGRFTISRDNAKKSLNLQMNSLRAEDTAVYYCARVRGKGWFDPWGPGTLVTVSS

SEQ ID NO: 25692 - protein, 96 aa, Homo sapiens
AASGFTFSDYWMGWVRQAPGKGLEWVANIKEDGNEKYYVDSVKGRFTISRDNAKKSLHLQMNSLRAEDTAVYYCARVRGKGWFDPWGPGTLVTVSS

SEQ ID NO: 25693 - protein, 96 aa, Homo sapiens; identical to SEQ ID NO: 25692

SEQ ID NO: 25694 - protein, 96 aa, Homo sapiens; identical to SEQ ID NO: 25690

SEQ ID NO: 25695 - protein, 92 aa, Homo sapiens
AASGFTFNTYWMSWVRQAPGKGLEWAAIMKEDGNDKYYVDSVKGRFTISRDNAKNSLYLQMNSLRAEDTGVYYCARGRGDLWGRGTLVIVSS

SEQ ID NO: 25696 - protein, 92 aa, Homo sapiens
AVSGFAFTTYWMSWVRQAPGKGLEWVAIINQDGGVKYYLDSVKGRVTISRDNAKNSLYLQMNSLRAEDTAVYYCARGRGDLWGRGTLVTVSS

SEQ ID NO: 25697 - protein, 92 aa, Homo sapiens
AASGFTFSNYWMNWVRQAPGKGLEWVANIKQDESEKYYVDSVKGRFTISRDNAKNSLYLQMNSLRAEDTAVYYCARGRGDLWGRGTLVTVSS

SEQ ID NO: 25698 - protein, 95 aa, Homo sapiens
ATSGFTFKNYIMNWVRQAPGKGLEWVSFIGSSGFTIYYADSVKGRFTISRDNAKNSLYLQMNSLRDEDTAVYYCARDQGRGLDYWGQGTLVTVSS

SEQ ID NO: 25699 - protein, 98 aa, Homo sapiens
AASGFTFSDYSMNWVRQAPGKGLEWLSYFSSDAAGPNLRFYADSVKGRFTISRDNAKNSLYLQMNGLRDDDTALYYCARDQGRGLDYWGHGTLVTVSS

SEQ ID NO: 25700 - protein, 95 aa, Homo sapiens
VASGFTFSSHWMHWVRQAPGKGLVWVSFIDNDGRTTQNADFVEGRFSISRDNAKNTLFLQMNTLRAEDTAVYFCARGGLGAVDYWGQGTLVTVSS

SEQ ID NO: 25701 - protein, 95 aa, Homo sapiens
AASGFTFSNYWMHWVRQAPGKGLVWVSYINSDGSDTSYADSVKGRFTISRDNAKNTLFLQMNSLRTEDTAVYYCARGGLGAVDYWGQGTLATVSS

SEQ ID NO: 25702 - protein, 96 aa, Homo sapiens
AASGFTFSRYEMNWVRQAPGKGLEWISYIIGSGTTIYYADSVKGRFTISRDNAKNSLYLQMNSLRAEDTAVYYCARDLSSGWFDPWGQGTLVTVSS

SEQ ID NO: 25703 - protein, 96 aa, Homo sapiens
AASGFTFSTYEMNWVRQAPGKGLEWVSYISSSGSTIYYADSVKGRFTISRDNAKNSLYLQMNSLRAEDTAVYYCARDLSSGWFDPWGQGTLVTVSS

SEQ ID NO: 25704 - protein, 91 aa, Homo sapiens
AASGFSFSSFWMSWVRQAPGKGPEWVAIINQDGSKKSYVDSVKGRFTISRDNAKNSLFLQVNSLRVDDTAVYYCVRGVDLWGRGTLVTVSS

SEQ ID NO: 25705 - protein, 91 aa, Homo sapiens
ATSGFTFSSYWMNWVRQAPGKGLEWVAYIKLDGSEKYYVDSVKGRFTISRDNAKNSLYLQMNSLRAEDTAVYYCVRGVDLWGRGTLVTVSS

SEQ ID NO: 25706 - protein, 95 aa, Homo sapiens
AASGFTFSNYGMRWVRQAPGKGLVWVSRIKGDGNSTTYADSVKGRFTISRDNAKNTLYLQMSSLRAEDTAVYYCARGRDYSFDYWGQGTLVTVSS

SEQ ID NO: 25707 - protein, 95 aa, Homo sapiens
VVSGFILSGSAMHWVRQAPGEGLVWVSFSNSDGSITNYAASVRGRFTISRDDAKNTLYLQMNSLRVEDTAVYYCARGRDYSFDYWGQGTLVTVSS

SEQ ID NO: 25708 - protein, 93 aa, Homo sapiens
AASGFTFSTYGMYWVRQAPGKGLEWVSAISGSGSDTYYADSVKGRFTISRDNSRDTLYLEMNSLRAEDTAVYYCAKSGFMDVWGQGTTVTVSS

SEQ ID NO: 25709 - protein, 93 aa, Homo sapiens
AGSGITFSSYAMNWVRQAPGKGLEWVSGISATRDRTYYADSVKGRFTISRDTSKNTLYLQMNSLRAEDTAVYYCAKSGFMDVWGQGTTVTVSS

SEQ ID NO: 25710 - protein, 101 aa, Homo sapiens
AASGFTLSDHYMDWVRQAPGKGLEWVGRLRNKANRQTTEYAASVRGRFTVSRDDSRNSLYLQMNSLKGEDTAVYYCARVRDSDGWFPFDYWGQGILVTVSS

SEQ ID NO: 25711 - protein, 101 aa, Homo sapiens
AASGFTLSDHYMDWVRQAPGKGLEWVGRTRNKANSHTTEYAASVKGRFIVSRDDSRNSLYLQMSSLKTEDTAVYYCARVRDSDGWFPFDYWGQGVLVTVSS

SEQ ID NO: 25712 - protein, 101 aa, Homo sapiens
AASGFTSRDHYMDWVRQAPGKGLEWVGRSRNKANGYTTEYAASVKGRFTISRDDSKNSLYLQMSSLKTEDTAVYYCARVRDSDGWFPFDYWGQGTLVTVSS

SEQ ID NO: 25713 - protein, 101 aa, Homo sapiens
AASGFTSSDHYMDWVRQSPGKGLEWVGRSRNKLNDYTTEYAASVKGRFTISRDDSKNSLNLQMNSLRIEDTAVYYCARVRDSDGWFPFDYWGQGTLVTVSS

SEQ ID NO: 25714 - protein, 106 aa, Homo sapiens
TQTLTLTCTFSGFSLSTNGVAVGWIRQPPGKALEWLALIYWDDDKRYSPSLKNRLTITKDTSRNQVVLTMTNMDPVDTATYYCAHKSSAGGWFDPWGQGTLVTVSS

SEQ ID NO: 25715 - protein, 106 aa, Homo sapiens
TQTLTLTCTFSGFSLSTSGVAVGWIRQPPGKALEWLALIYWDDDKRYSPSLKSRLTITKDTSKNQVVLTLTNMDPVDTATYFCAHKSSAGGWFDPWGQGTLVTVSS

SEQ ID NO: 25716 - protein, 100 aa, Homo sapiens
AASGFTFSTSPMHWVRRAPGKGLEWVAVISPDENTKVYVDSVKGRFTISRDNSNNALYLQMNSLRVEDTAVYYCAREGHSSGRAGAFDVWGQGTMVTVAS

SEQ ID NO: 25717 - protein, 100 aa, Homo sapiens
EASGFTFRNYVMHWVRQAPGKGLEWVALFASADTSTQYADSVKGRFTISRDNSRNTVFLEINSLTTEDAAIYFCAREGHSSGRAGAFDVWGRGTVVTVSS

SEQ ID NO: 25718 - protein, 104 aa, Homo sapiens
AASGFTFSSYEMNWVRQAPGKGLEWVSYISNYGNTIYYADSVKGRFTISRDNVKNSLYLQMNSLRAEDTAIYYCARSYCSGGSCYTHYYGMDVWGQGTTVTVSS

SEQ ID NO: 25719 - protein, 104 aa, Homo sapiens
VASGFTFTNYEMNWVRQTPGKGLEWVSYISSGGGSTYYVVSVKGRFTISRDNAKNSTYLQMNSLRAEDTAVYYCARSYCSGGSCYTHYYGMDVWGQGTTVTVSS

SEQ ID NO: 25720 - protein, 104 aa, Homo sapiens
VASEFTFSNYEMNWVRQAPGKGLEWVSYISSGGGTKYYADSVKGRFTISRDNAENSLYLQMNSLRAEDTAVYYCARSYCSGGSCYTHYYGMDVWGQGTTVTVSS

SEQ ID NO: 25721 - protein, 104 aa, Homo sapiens
VASGFTFTSYEMNWVRQAPGKGLEWVSYISSGGGRTYYVDSVKGRFTISRDNAKNSTYLQMNSLRAEDTAVYYCARSYCSGGSCYTHYYGMDVWGQGTTVTVSS

SEQ ID NO: 25722 - protein, 96 aa, Homo sapiens
AASGFTFSTYTINWVRQAPGKGLEWVSLISSSSDFIHYADSVKGRFTISRDNAKKSLYLQMNSLRADDTAVYYCARDYYKGAFDIWGHGTMVTVSS

SEQ ID NO: 25723 - protein, 96 aa, Homo sapiens
AASGFTFSTYSIHWVRQAPGKGLEWVSCINSRSDYIYYADSVKGRFTVSRDNAKNSLYLQMNSLRAEDTAVYYCARDYYKGAFDIWGQGTMVTVSS

SEQ ID NO: 25724 - protein, 95 aa, Homo sapiens
ASGFTFSTYSIHWVRQAPGKGLEWVSCINSRSDYIYYADSVKGRFTVSRDNAKNSLYLQMNSLRAEDTAVYYCARDYYKGAFDIWGQGTMVTVSS

SEQ ID NO: 25725 - protein, 92 aa, Homo sapiens
AASGFTFPSHDMTWVRQAPGKGLEWVSFIKGGGDLTDYPDSVKGRFTISRDISKNTLYLQMNSLRAEDTALYYCVKGHFASWGQGTLVTVSS

SEQ ID NO: 25726 - protein, 92 aa, Homo sapiens
EASGFTLSTYDMSWVRQSPGKGLEWISFIRGNLGGTYYADSVKGRFTISRDNAKNALYLQMSGLRAEDTALYYCVKGHFASWGQGTLVTVSS

SEQ ID NO: 25727 - protein, 97 aa, Homo sapiens
AASGFTFSSYEMNWVRQAPGKGLEWVSYIRGDSRSIHYADSVKGRFTISRDNAKNSLYLQMNSLRAEDTAVYYCARDLYHFYGLDVWGQGTTVTVSS

SEQ ID NO: 25728 - protein, 97 aa, Homo sapiens
EASGFILSNFEMNWVRQAPGKGLEWVSYIAINGNDRRYADSVRGRFSISRDSARNSLYLQMNSLRVDDTAIYYCARDLYHFYGLDVWGQGTTVTVSS

SEQ ID NO: 25729 - protein, 91 aa, Homo sapiens
AASGFTFSNYWMHWVRQAPGKGLVWVSVIKDDGSSTDYADSVKGRFTISRDNAKNMLYLQMNSLRVDDTAVYYCLRDLFRGAQGTVVTVSS

SEQ ID NO: 25730 - protein, 91 aa, Homo sapiens
AASGFTFSTYWMFWVRQAPGKELEWVARIDNEGSFTSYADSVTGRFTISRDNAKSTLYLQMNSLRAEDTAVYYCLRDLFRRAQGALVTVSS

SEQ ID NO: 25731 - protein, 94 aa, Homo sapiens
AASGFTFRNYWMCWVRQAPGEGLEWVANIKQDGSEKYYVDSVKGRFTISRDNAKNSLYLQMNSLRAEDTAIYYCATGGGYPDYWGQGTLVTVSS

SEQ ID NO: 25732 - protein, 94 aa, Homo sapiens
VVSGFTFRRHWMTWVRQAPGKGLEWVANIKQDGSEKYYADSVKGRFTISRDNARNSLFLQTNSLRVDDTAVYYCATGGGYPDYWGQGTLVTVSS

SEQ ID NO: 25733 - protein, 94 aa, Homo sapiens
TVSGGSISSGSSYWSWIRQPAGKGLEWIGRIYTSGSTSYNPSLTSRVTISIDTSKNQFSLKLSSVTAADTAVYYCARGGYFDYWGQGTLVTVSS

SEQ ID NO: 25734 - protein, 94 aa, Homo sapiens
TVSGGSISSGSYYWSWIRQPAGKGLEWIGRIYTSGNTNYNPSLESRVTISVDTSKSQFSLKLSSVTAADTAVYYCARGGYFDYWGQGTLVTVSS

SEQ ID NO: 25735 - protein, 94 aa, Homo sapiens
AGSGFTFSSYWMTWVRQAPGKGLEWVAYIKEDGSEKYHLDSVKGRFTISRDNAKNSVYLQMNTLRGEDTAVYYCARGVYHFDFWGQGTLVTVSS

SEQ ID NO: 25736 - protein, 94 aa, Homo sapiens
AASGFTFSSFWMSWVRLAPGKGLEWVANIKEDGSEIYYVDSVKGRFTISRDNAKNSLFLQMNSLRAEDTAVYYCARGVYHFDFWGQGTLVTVSS

SEQ ID NO: 25737 - protein, 93 aa, Homo sapiens
AASGFTFSSYWMHWVRQAPGKGLVWVSRINSDGSTIGYADSVKGRFTISRDNTKNTLYVQMNSLRAEDTAVYYCVRGNIMDVWGQGTTVTVFS

SEQ ID NO: 25738 - protein, 93 aa, Homo sapiens
AASGFTFSSYWMHWVRRAPGKGLVWVSRINSDGTNTTYADSVKGRFTISRDNAKNRLYLQMNSLRAEDTAVYYCVRGNIMDVWGQGATVTVSS

SEQ ID NO: 25739 - protein, 98 aa, Homo sapiens
AASGFTFSSYSMNWVRQAPGKGLEWVSSIDSTTIYIYYADSVKGRFTTSRDNAKNSVSLQMGSLRAEDTAVYYCARDRGDGHSPPDYWGQGTLVTVSS

SEQ ID NO: 25740 - protein, 98 aa, Homo sapiens
AASGFTFSSYSMNWVRQAPGKGLQWVSSIDTSSNYIYYVDSVKGRFTTSRNNAKKSVDLQMNSLTAEDTAVYYCARDRGDGHSPPDYWGQGTLVTVSS

SEQ ID NO: 25741 - protein, 92 aa, Homo sapiens
TVSGGSISPYSWSWIRQPPGKGLEWIGCISYTGNTNYNPSLKSRVTISVDTSKNEFSLKLRSVTAADTAVYYCARRIYMDVWGKGATVTVSS

SEQ ID NO: 25742 - protein, 91 aa, Homo sapiens
VSGGSMTNYNWNWIRQLPGEGLEWVGYISDSGNTNYSPSLKSRVTMSLDRSKNEFSLKLNSVTAADTAVYYCARRIYMDVWGRGTAVTVSS

SEQ ID NO: 25743 - protein, 92 aa, Homo sapiens
TVSGGSISGYYWNWIRQPPGKGLEWIGNISASGSTTYNPSLKSRVTMSVDRSKNELSLKLTSVTAADTAVYYCARRIYMDVWGKGTTVTVSS

SEQ ID NO: 25744 - protein, 96 aa, Homo sapiens
KGSGYRFTSYWIAWVRQMPGKGLEWMGIIYPGDSDTKYSPSFQGQVTISADKSISTAYLQWSSLKASDTAMYYCARQGGTGAFDIWGQGTMVTVSS

SEQ ID NO: 25745 - protein, 96 aa, Homo sapiens
KGSGYRFTSYWIAWVRQMPGKGPEWMGIIYPGDSDSRYSPSFQGQVTISADKSISTAHLQWSSLKASDTAMYYCARQGGTGAFDIWGQGTMVTVSS

SEQ ID NO: 25746 - protein, 92 aa, Homo sapiens
AASGFTFSGNWMTWVRQAPGKGLEWVANIKQDGSEKNYVDSVKGRFTISRDNGKSSLYLQMNSLRDDDTAVYFCARGRGISWGQGTLVTVSS

SEQ ID NO: 25747 - protein, 92 aa, Homo sapiens
ADSGFTFSSYWMTWVRQAPGKGLEWVANIKQDGREKNYVDSVKGRFTISRDNAKNSLYLQMNSLRAEDTAVYYCARGRGISWGQGTLVTVSS

SEQ ID NO: 25748 - protein, 93 aa, Homo sapiens
ASGFSFSSYCMHWVRQAPGKGPLWVARICDAATSPDYADSVKGRFTISRDNAKNTVYLQMDSLRAEDTAVYYCARIDYPDDCWGQGTLVTVSS

SEQ ID NO: 25749 - protein, 94 aa, Homo sapiens
AASGFTFSSYWMHWIRQAPGKGLVWVSRIDGAGTSTNYADSVKARFTVSRDNAKNTLYLQMDSLRAEDTAVYYCARIDYPDDCWGQGTLVTVSS

SEQ ID NO: 25750 - protein, 94 aa, Homo sapiens
ASGYSFTTYAIHWVCQAPGQRLEWIGYINAGNGNTKYSQKFQNRVTITRDTSASTVFMELSSLRSEDTALYFCARGLAGAFDYWGQGTLVTVSS

SEQ ID NO: 25751 - protein, 94 aa, Homo sapiens
ASGYTFTSYVMHWVRQAPGQRLEWMGRIHAGNSNTKYSQMFQGRVTITRDTSASTAYMELSSLRSEDAAVYYCARGLAGAFDYWGQGTLVAVSS

SEQ ID NO: 25752 - protein, 93 aa, Homo sapiens
VASGFTFNNYEMNWVRQAPGKGLEWVSSITVSGDSTFYADSVRSRFTISRDNARNSAFLQMNSLSADDTAVYYCVRGSAGSWWGRGSLVTVSS

SEQ ID NO: 25753 - protein, 93 aa, Homo sapiens
AASGFIFSSYEINWVRQAPGKGLEWVSHISSSGNSIYYADSVKGRFTISRDNAKNSLYLQMNSLRAEDTAVYYCVRGSAGSWWGQGTLVTVSS

SEQ ID NO: 25754 - protein, 92 aa, Homo sapiens
SVSGASVSSYYWSWIRQPPGKGLEWIGYAYNSGITNYNPSLKSRVTISIDTSRNQFSLKLASVTAADTAMYYCARGILFDYWGQGTLVTVSS

SEQ ID NO: 25755 - protein, 92 aa, Homo sapiens
TVSDGSFSSYYWSWIRQPPGKRLEWIGDIYYSGSTNYNPSLKSRVTISVDTSKNQFSLKLSSVTAADTAVYYCARGILFDYWGQGTLVTVSS

SEQ ID NO: 25756 - protein, 92 aa, Homo sapiens
ASGYTFTTYGISWVRQAPGQGLEWMGWISANNGNTNYAQKFQGRVTMTTDTSTSTAYMELRSLLSDDTAVYYCARRNYGDYWGQGTLVTVSS

SEQ ID NO: 25757 - protein, 92 aa, Homo sapiens
ASGYAFTSYFITWVRQAPGQGPEWMGWISPYNGNTKYAQKLQGRVTMTTNTSTTTAYMELGSLTSDDTAVYYCARRNYGDYWGQGTLVTVSS

SEQ ID NO: 25758 - protein, 97 aa, Homo sapiens
AASGFTFSDYTMNWVRQAPGKGLEWVSSISSGSVVYKYYADSVKGRFTISRDNAKNSLDLQMESLRAEDTAVYYCARDLGWYGLDYWGHGSLVTVSS

SEQ ID NO: 25759 - protein, 97 aa, Homo sapiens
AASGFPFSSYSMNWVRQAPGKGLEWVSSISSSGSSFTYYADSVRGRFTISRDDATNSLYLQMNSLRAEDTAVYHCARDLGWYGLDYWGQGTLVTVSS

SEQ ID NO: 25760 - protein, 98 aa, Homo sapiens
AASGFTFSSYAMSWVRQAPGKGLEWVSTVSSSGGNTYYADSVKGRFTISRDNSKNTLYLQMNSLRADDTAVYYCAKDLRDLLQYFQHWGQGTLVTVAS

SEQ ID NO: 25761 - protein, 98 aa, Homo sapiens
AASQFTFSTYAMSWVRQAPGKGLEWVSSVSGGADNTYYADSVKGRFTISRDNSKNTLYLQMNSLRVEDTAVYYCAKDLRDLLQYFQHWGQGTLVTVSS

SEQ ID NO: 25762 - protein, 91 aa, Homo sapiens
SGYTFTSYDINWVRQATGQGLEWVGWMNPNNGNAGFAQKFQGRVIMTRDTSISTAYMEVSSLRSDDTGVYYCARSALLDSWGQGTLVTVSS

SEQ ID NO: 25763 - protein, 92 aa, Homo sapiens
ASGYTFSNSDINWVRQATGQGLEWMGWMNPNNNNAGFAQKFQGRVTMTRNTSISTAYLELSSLRFEDTAVYYCARSALLDSWGQGTLVTVSS

SEQ ID NO: 25764 - protein, 94 aa, Homo sapiens
AASGFTFTTYWMTWVRQAPGKGLEWVANINQDGSEKYYVDSVNGRFTISRDNAQNSLYLQMNSLRAEDTALYYCARGRSWVDSWGQGTLVTVSS

SEQ ID NO: 25765 - protein, 94 aa, Homo sapiens
AASGFTFSAYWMIWVRQVPGKGLEWVADIKEDGSEKNYMDSVKGRFTISRDNTKNSLYLQMNSLRGEDTAVYYCARGRSWVDSWGPGTLVTVSS

SEQ ID NO: 25766 - protein, 99 aa, Homo sapiens
ATSGFTFSKYPMHWVRQAPGKGLEWVAVIGYDGRLRFYADSVKGRFTISRDDSRNILYLQMNSLRTEDTAVYFCARDMFQGVPDYFDLWGQGTLVAVSS

SEQ ID NO: 25767 - protein, 98 aa, Homo sapiens
AASGFTFSNFAMHWVRQAPGKGLEWVAVIGFDGRLKFYSGSVGGRFTISRDDSKNMLFLQMDNLRSEDTAMYYCARDMFQGVPDYFDLWGRGTLVSVS

SEQ ID NO: 25768 - protein, 99 aa, Homo sapiens
ATSGFTFSKYPMHWVRQAPGKGLEWVAVIGYDGRLRFYADSVKGRFTISRDDSRNILYLQMNSLRTEDTAVCFCARDMFQGVPDYFDLWGQGTLVAVSS

SEQ ID NO: 25769 - protein, 98 aa, Homo sapiens
AASGFTFTAYAMSWVRQAPGMGLEWVATLSTSGDAAVYADSVKGRFTISRDVSKYTLSLQMNSLRVEDTALYYCAKRGGDGWGAFDYWGQGTLVTVSS

SEQ ID NO: 25770 - protein, 98 aa, Homo sapiens
VASGFRFSIYAMNWVRQAPGKGLEWVSTIGGTSTNTFYADSVKGRFTISRDDSKNTVYLQMNSLNAEDTALYYCAKRGGDGWGAFDYWGQGTLVTVSS

SEQ ID NO: 25771 - protein, 98 aa, Homo sapiens
TVSGGSISSSRYFWGWIRQPPGKGLEWIGSISYSGGTDYNPSLRSRVTISVDKSKNQFSLKVNSVTAADTAVYYCARRGDSHGMFDYWGQGTLVTVSS

SEQ ID NO: 25772 - protein, 98 aa, Homo sapiens
IVSGGSISSSRYFWGWIRQPPGKGLEWIGTIFYSGGTDYNPSLRSRVTISVDKSKNQFSLKVSSVTAADTAVYYCARRGDSHGMFDYWGQGTLVTVSS

SEQ ID NO: 25773 - protein, 97 aa, Homo sapiens
TVSGGSISSRYYWGWIRQSPGKGLEWIGSISYSGSTDYNPSLRSRVTISVDKSKNHFSLKVTSVTAADTAVYYCARRGDSHGMFDYWGQGTLVTVSS

SEQ ID NO: 25774 - protein, 98 aa, Homo sapiens; identical to SEQ ID NO: 25771

SEQ ID NO: 25775 - protein, 98 aa, Homo sapiens
TVSGGSISSSCYFWGWIRQPPGKGLEWIGSISYSGGTDYNPSLRSRVTISVDKSKNQFSLKVNSVTAADTAVYYCARRGDSHGMFDYWGQGTLVTVSS

SEQ ID NO: 25776 - protein, 98 aa, Homo sapiens
TVSGGSISSPKYYWAWIRQPPGKGLEWIGTIYYSGSTYYSASLKSRVTISVDTSKNQFSLKLSSVTAADTAVYYCARRGDSHGMFDYWGQGTLVTVSS

SEQ ID NO: 25777 - protein, 95 aa, Homo sapiens
TVSGGSISSYYWSWIRQPPGKGLEWIGYFYYSGSTNYNPSLKSRVTISSDTSKNQFSLKLSSVTAADTAVYYCARDSMGGPFDYWGQGTLLTVSS

SEQ ID NO: 25778 - protein, 95 aa, Homo sapiens
TVSGGSISTYYWSWIRQPPGKGLEWIAYVHYSGSANYNPSLKSRVIISLDTSKNQFSLRLYSVTAADTAVYYCARDSMGGPFDYWGQGALVTVSS

SEQ ID NO: 25779 - protein, 95 aa, Homo sapiens
TVSGGSISTYYWSWIRQPPGKGLEWIAYVHYTGSATYNPSLKSRVIISLDTSKNQFSLRLGSVTAADTAVYYCARDSMGGPFDYWGQGALVTVSS

SEQ ID NO: 25780 - protein, 95 aa, Homo sapiens
TVSGGSISTYYWSWIRQPPGKGLEWIAFVHYSGSANYNPSLKSRVIVSLDTSKNQFSLRLGSVTAADTAVYYCARDSMGGPFDYWGQGALVTVSS

SEQ ID NO: 25781 - protein, 97 aa, Homo sapiens
AAFGFTFSNYDMHWVRQAPGQGLEWVSSIGTAGDPYSSGSVKGRFTVSRENGKNSLYLQMNSLRAGDTAVYYCARGGYFGSGPLDSWGQGTLVTVSS

SEQ ID NO: 25782 - protein, 97 aa, Homo sapiens
AAFGFTFSNYDMHWVRQAPGQGLEWVSSIGTAGDPYSSGSVKGRFTVSRENGKNSLYLQMNGLRAGDTAVYYCARGGYFGSGPLDSWGQGTLVTVSS

SEQ ID NO: 25783 - protein, 97 aa, Homo sapiens
AASGFTFSSYDMHWVRQPSGKGLEWVSSIDTAGDTYYSGSVKGRFTISRENAKNSFYLQMSALRAGDTAVYYCARGGYFGSGPLDSWGQGTLVTVSS

SEQ ID NO: 25784 - protein, 97 aa, Homo sapiens
AAFGFTFSNYDMHWVRQAPGQGLEWVSSIGTAGDPYSSGSVKGRFTVSRENGQNSFYLQMKSLRAGDTAVYYCARGGYFGSGPLDSWGQGTLVTVSS

SEQ ID NO: 25785 - protein, 97 aa, Homo sapiens; identical to SEQ ID NO: 25781

SEQ ID NO: 25786 - protein, 98 aa, Homo sapiens
TVSGGSISGYHWSWIRQPPGKGLEWIGYISYSGSTNYNPSLKSRVTMSVDTSKNQFSLKLSSVTAADTAVYYCARHGDYYGSGRFDPWGQGTLVTVSS

SEQ ID NO: 25787 - protein, 98 aa, Homo sapiens; identical to SEQ ID NO: 25786

SEQ ID NO: 25788 - protein, 98 aa, Homo sapiens
TVSGGSISGYYWSWIRQPPGKGLEWIGYIHSNGVTNYNPSLKSRVTISVDTSKNQFSLNLSSVTAADTAFYYCARHGDYYGSGRFDPWGQGTLVTVSS

SEQ ID NO: 25789 - protein, 98 aa, Homo sapiens
TVSGGSISGYHWSWIRQPPGKGLEWIGYISYSGSTNYNPSLTSRVTMSVDTSKNQFSLKLSSVTAADTAVYYCARHGDYYGSGRFDPWGQGTLVTVSS

SEQ ID NO: 25790 - protein, 98 aa, Homo sapiens
TVSGGSISGYHWSWIRQPPGKGLEWIGYISYSGGTNYNPSLRSRVTMSVDTSKNQFSLKLSSMTAADTAVYYCARHGDYYGSGRFDPWGQGTLVTVSS

SEQ ID NO: 25791 - protein, 99 aa, Homo sapiens
AASEFIFNRYAMSWVRQAPGKGLEWVSAISDSGGDTYYADSVKGRFTISRDNSKNTLYLQMNSLRDDDTAVYYCVKGSSDGRPYYFDHWGQGTLVTVSS

SEQ ID NO: 25792 - protein, 98 aa, Homo sapiens
AASGFTFSNYAMSWVRQAPGKGLQWVSAITWSGGDTYQADSATGRFTISRDNSKNTLFLHLNNLRAEDTALYYCVKGSSDGRPYYFDHWGQGTLVMVS

SEQ ID NO: 25793 - protein, 100 aa, Homo sapiens
ASGYTFTSHSITWVRQAPGQGLEWMGWISNYNGDTKYAQRVQGRVTFTTDASTTTAYMELRNLRSDDTAVYYCARDPSNTSGLYAYFDYWGQGTLVTVSS

SEQ ID NO: 25794 - protein, 100 aa, Homo sapiens
ASGYTFTSHGISWVRQAPGQGLEWMGWISAWNGDTKYAQNLQGRVTMTTDASTSTAYMELRSLRSDDTAVYYCARDPSNTSGLYAYFDYWGQGTLVTVSS

SEQ ID NO: 25795 - protein, 100 aa, Homo sapiens
ASGYTFTSHGISWVRQAPGQGLEWMGWISAYNGDTKYAQKLQGRVTMTTDTSTSTAYMELRSLTSDDTAVYYCARDPSNTSGLYAYFDYWGQGTLVTVSS

SEQ ID NO: 25796 - protein, 100 aa, Homo sapiens
ASGYTFTSHSITWVRQAPGQGLEWMGWISNYNGDTKYAQRVQGRVTMTTDASTTTAYMELRSLRSDDTAVYYCARDPSNTSGLYAYFDYWGQGTLVTVSS

SEQ ID NO: 25797 - protein, 94 aa, Homo sapiens
ASGYTFTNYYMHWVRQAPGQGLEWMGIINPTGTTTNYAQRFQGRLTMTRDTSTSTLYMELSSLISEDTAMYYCARELPKAFDIWGQGTMVTVSS

SEQ ID NO: 25798 - protein, 94 aa, Homo sapiens
ASGYTFSNYYMHWVRQAPGQGLEWMGIINPTGTVTIYAQRFQGRLTMTRDTSTSTLYMELSSLQSEDTAMFYCARELPKAFDIWGQGTMVTVSS

SEQ ID NO: 25799 - protein, 92 aa, Homo sapiens
SGYTFTSHYMHWVRQAPGQGLEWMGIINLNGDGTYAQKFQGRVTMTRDTSTSTVYMELSSLRPDDTAVYYCARELPKAFDIWGQGTLVTVSS

SEQ ID NO: 25800 - protein, 93 aa, Homo sapiens
ASGYTFTSHYTHWVRQAPGQGPEWMGIINLSGGTWYAQKFQGRVTMTRDTSTSTAYMELSSLRSEDTAVYYCARELPKAFDIWGQGTLVTVSS

SEQ ID NO: 25801 - protein, 96 aa, Homo sapiens
AASGFTFSNYAIHWVRQAPGKGLQWVGVISSDGSKKYYADSVKGRFTISRDNSKNTLYLEMNSLRPEDTAVYYCARGPSGSYYDYWGQGTLVTVSS

SEQ ID NO: 25802 - protein, 96 aa, Homo sapiens
AGSGFTFSTYAIHWVRQAPGKGLEWVAVISFDGSNKYYADSVKGRFTISRDNPKNTLYLQMNSLRVEDTAVYYCARGPSGSYYDYWGQGTLVTVSS

SEQ ID NO: 25803 - protein, 95 aa, Homo sapiens
AASGFTLSGSTIHWVRQASGKGLEWVGRIKGKANNYATAYAASVKGRFTISRDDSKNTAYLQMNSLKTEDTAVYYCASGGDCDSWGHGTLVTVSS

SEQ ID NO: 25804 - protein, 95 aa, Homo sapiens
AASGFIFSDSTIHWVRQASGKGLEWVGRIKSKANNYATAYVASVKGRFTISRDDSQNTAYLQMNSLKTDDTAVYYCASGGDCDSWGQGTLITVSS

SEQ ID NO: 25805 - protein, 95 aa, Homo sapiens
AASGFTFSDSTIHWVRQASGTGLEWVGRIKRKKNNYETAYVASVKGRFTISRDDSQNTAYLQMNNLKTDDTAVYYCASGGDCDSWGQGTLVTVSS

SEQ ID NO: 25806 - protein, 95 aa, Homo sapiens
AASGFSFSDSTIHWVRQASGKGLEWVGRIKSKANNYATAYVASVKGRFTISRDDSQNTAYLQMNSLRADDTAVYYCASGGDCDSWGQGTLITVSS

SEQ ID NO: 25807 - protein, 95 aa, Homo sapiens
AASGFSFSDSTIHWVRQASGKGLEWVGRIKRKSNNYETAYVASVKGRFTISRDDSQNTAYLQMNRLKIDDTAVYYCASGGDCDSWGQGTLVTVSS

SEQ ID NO: 25808 - protein, 95 aa, Homo sapiens; identical to SEQ ID NO: 25804

SEQ ID NO: 25809 - protein, 95 aa, Homo sapiens; identical to SEQ ID NO: 25806

SEQ ID NO: 25810 - protein, 101 aa, Homo sapiens
AASGFTFDSYAMGWVRQAPGKGLQWVSLISGSGGSTYYTDSVKGRFIISRDNSKNTLYLQMNSLRAEDTAVYYCAKAGCSGGNCYRPPDYWGQGTLVTVSS

SEQ ID NO: 25811 - protein, 101 aa, Homo sapiens
AASGFTFSSYAMSWVRQAPGKGLEWVSTISGGGGSTFYADSVKGRFTISRDNSKNTLYLQMLSLRAEDTALYYCAKAGCSGGNCYRPPDYWGQGTLVTVSS

SEQ ID NO: 25812 - protein, 95 aa, Homo sapiens
AASGFSFSAYAMSWVRQAPEKGLEWVSAARGSGGYTYYGDSVKGRFTSSRDNSQNTLYLQMNSLRAEDTAIYYCARDSRGAFDIWGQGTMVTVSS

SEQ ID NO: 25813 - protein, 95 aa, Homo sapiens
VASGWDFSTSAMSWVRQAPEKGLEWVSAARGSGGYTYYGDSVKGRFTSSRDNSQNTLYLQMNSLRAEDTAIYYCARDSRGAFDIWGQGTMVTVSS

SEQ ID NO: 25814 - protein, 95 aa, Homo sapiens
AASGFTFTNYAMSWVRQAPGKGLEWVSAMRGSGDYTYYADSVKGRFTISRDNSQNTLYLQMNSLRAEDTAIYYCARDSRGAFDIWGQGTMVTVSS

SEQ ID NO: 25815 - protein, 95 aa, Homo sapiens
AASGFSFSTSAMSWVRQAPEKGLEWVSAARGSGGYTYYGDSVKGRFTSSRDNSQNTLYLQMNSLRDEDTAIYYCARDSRGAFDIWGQGTMVTVSS

SEQ ID NO: 25816 - protein, 95 aa, Homo sapiens
AASGFTFSNYAMSWVRQAPGKGLEWVSAIRGSGGYTYYVDSVKGRFTSSRDNSQNTLYLQMNSLRAEDTAIYYCARDSRGAFDIWGQGTMVTVSS

SEQ ID NO: 25817 - protein, 95 aa, Homo sapiens
AASGFTFSSYAMSWVRQGPEKGLEWVSAARGSGGYTYYGDSVKGRFTSSRDNSQNTLYLQMNSLRAEDTAIYYCARDSRGAFDIWGQGTMVTVSS

SEQ ID NO: 25818 - protein, 95 aa, Homo sapiens
AASGFTFTNYAMSWVRQAPGKGLEWVSAMRGSGDYTYYADSVKGRFTISRDNSQNSLYLQMNSLRAEDTAIYYCARDSRGAFDIWGQGTMVTVSS

SEQ ID NO: 25819 - protein, 95 aa, Homo sapiens; identical to SEQ ID NO: 25813

SEQ ID NO: 25820 - protein, 95 aa, Homo sapiens
AASGFSFSTSAMSWVRQAPEKGLEWVSAARGSGGYTYYGDSVKGRFTSSRDNSQNMLYLQMNSLRAEDTAIYYCARDSRGAFDIWGQGTMVTVSS

SEQ ID NO: 25821 - protein, 95 aa, Homo sapiens
AASGFIFSNYAMSWVRQAPGKGLEWVSNMRGSGDYTYYADSVKGRFTISRDNSKRTLSLQMNSLRAEDTAVYYCARDSRGAFDIWGQGTVVTVSS

SEQ ID NO: 25822 - protein, 95 aa, Homo sapiens; identical to SEQ ID NO: 25821

SEQ ID NO: 25823 - protein, 95 aa, Homo sapiens
AASGSIFSNYAMSWVRQAPGKGLEWVSNMRGSGDYTYYADSVKGRFTISRDNSKRTLSLQMNSLRAEDTAVYYCARDSRGAFDIWGQGTVVTVSS

SEQ ID NO: 25824 - protein, 95 aa, Homo sapiens; identical to SEQ ID NO: 25821

SEQ ID NO: 25825 - protein, 95 aa, Homo sapiens
AASGFIFSNYAMSWVRQAPGKGLEWVSNMRGSGDYTYYADSVKGRFTISRDNSKRTLSLQMSSLRAEDTAVYYCARDSRGAFDIWGQGTVVTVSS

SEQ ID NO: 25826 - protein, 95 aa, Homo sapiens
AASGFTFSNYAISWVRQAPGKGLEWVSAVRGGGDKTYYTDSVKGRFTISRDNSKNTLYLQMNSLRAEDTAIYYCARDSRGAFDIWGQGTMVTVSS

SEQ ID NO: 25827 - protein, 95 aa, Homo sapiens
AASGFTFSNYAMSWVRQAPGKGLEWVSAMRGSGDYTYYADSVKGRFTISRDNSQNTLYLQMNSLRAEDTAIYYCARDSRGAFDIWGQGTMVTVSS

SEQ ID NO: 25828 - protein, 95 aa, Homo sapiens
AASGFSFSTSAMSWVRQAPEKGLEWVSAARGSGGYTYYGDSVKGRFTSSRDNSQNMFYLQMNSLRAEDTAIYYCARDSRGAFDIWGQGTMVTVSS

SEQ ID NO: 25829 - protein, 95 aa, Homo sapiens
VASGLSFSTSAMSWVRQAPEKGLEWVSAARGSGGYTYYGDSVKGRFTSSRDNSQNTLYLQMNSLRAEDTAIYYCARDSRGAFDIWGQGTMVTVSS

SEQ ID NO: 25830 - protein, 95 aa, Homo sapiens
AASGFTFSNYAMIWVRQAPEKGLEWVSAARGSNGYTYYGDSVKGRFVTSRDNSQNTLYLQMNSLRAEDTAIYYCARDSRGAFDIWGQGTVVTVSS

SEQ ID NO: 25831 - protein, 95 aa, Homo sapiens
AASGFTFSTSAMSWVRQAPEKGLEWVSAARGSGGYTYYGDSVKGRFTSSRDNSQNTLYLQMNSLRAEDTAIYYCARDSRGAFDIWGQGTMVTVSS

SEQ ID NO: 25832 - protein, 95 aa, Homo sapiens; identical to SEQ ID NO: 25814

SEQ ID NO: 25833 - protein, 96 aa, Homo sapiens
AASGFTFSSYWMHWVRQTPGKGLVWVSHINHNGNSRGYADSVKGRFTISRDNDKNTVSLQMNSLRAEDTAVYYCAREGLMRATDYWGQGTLVTVSS

SEQ ID NO: 25834 - protein, 96 aa, Homo sapiens; identical to SEQ ID NO: 25833

SEQ ID NO: 25835 - protein, 96 aa, Homo sapiens
AASGFTVSSYWMHWVRQTPGKGPVWVSHINHNGNSRGYADSVKGRFTISRDNDKNTVSLQMNSLRAEDTAVYYCAREGLMRATDYWGQGTLVTVSS

SEQ ID NO: 25836 - protein, 96 aa, Homo sapiens
AASGFTVSSYWMHWVRQTPGKGPVWVSHINHNGNSRGYADSVKGRFTISRDNDKNTVSLQMDSLRAEDTAVYYCAREGLMRATDYWGQGTLVTVSS

SEQ ID NO: 25837 - protein, 96 aa, Homo sapiens
AASGFTLSSYWMHWVRQTPGKGLVWVSHINHNGNSRGYADSVKGRFTISRDNDKNTVSLQMNSLRAEDTGVYYCAREGLMRATDYWGQGTLVTVSS

SEQ ID NO: 25838 - protein, 95 aa, Homo sapiens
ASGFTVSSYWMHWVRQTPGKGPVWVSHINHNGNSRGYADSVKGRFTISRDNDKNTVSLQMNSLRAEDTAVYYCAREGLMRATDYWGQGTLVTVSS

SEQ ID NO: 25839 - protein, 96 aa, Homo sapiens
AVSGFTFSSYWMHWVRQAPGKGLVWVSHIRGDGRDTGYADSVKGRFTISRDNAKNTMYLQMNSLRVEDTAVYLCAREGLMRATDYWGQGTLVTVSS

SEQ ID NO: 25840 - protein, 103 aa, Homo sapiens
AASGFTFSSYWMSWVRQAPGKGLEWVAKIKQDGSDKDYVDSVKGRFTISRDNAKNSLYLQMNNLRAEDTAVYYCARDGYCSGGRCYSGWFDPWGQGTLVTVSS

SEQ ID NO: 25841 - protein, 103 aa, Homo sapiens
VASGFTFSNYWMSWVRQAPGKGPEWVANIKQDGSEKYYVDSVKGRFTISRDNAKNSLYLQMNSLRAEDTAVYYCARDGYCSGGRCYSGWFDPWGQGTLVTVSS

SEQ ID NO: 25842 - protein, 103 aa, Homo sapiens
VASGFTFSNYWMSWVRQAPGKGPEWVANIKQDGSEKNYVDSVKGRFTISRDNAKNSLYLQMNSLRAEDTAMYYCARDGYCSGGRCYSGWFDPWGQGTLVTVSS

SEQ ID NO: 25843 - protein, 103 aa, Homo sapiens
AASGFTFSSYWMTWVRQAPGRGLEWVAKIKQDGSDKDYVDSVKGRFTISRDNAKNSLYLQMNNLRAEDTAVYYCARDGYCSGGRCYSGWFDPWGQGTLVTVSS

SEQ ID NO: 25844 - protein, 103 aa, Homo sapiens
AASGFTFSSYWMSWVRQAPGKGLEWVAKIKQDGSDKDYVDSVKGRFTISRDNAESSLYLQMNNLRAEDTAVYYCARDGYCSGGRCYSGWFDPWGQGTLVTVSS

SEQ ID NO: 25845 - protein, 103 aa, Homo sapiens
VASGFTFSNYWMSWVRQAPGKGPEWVANIKQDGGEKYYVDSVTGRFTISRDNAKNSLYLQMNSLRAEDTAVYFCARDGYCSGGRCYSGWFDPWGQGTLVTVSS

SEQ ID NO: 25846 - protein, 96 aa, Homo sapiens
SGYTFTTYALHWVRQAPGQRLEWMGWINVGNTYTHFAQRFQGRITITSDTSASTAYMELSSLRSEDTAVYYCARSRGYSAYEFDYWGQGTLVTVSS

SEQ ID NO: 25847 - protein, 97 aa, Homo sapiens
ASGGTFSSYAINWVRQAPGQRLEWMGWINVGNTYTHFAQRFQGRITITSDTSASTAYMELSSLRSEDTAVYYCARSRGYSAYEFDYWGQGTLVTVSS

SEQ ID NO: 25848 - protein, 96 aa, Homo sapiens; identical to SEQ ID NO: 25846

SEQ ID NO: 25849 - protein, 97 aa, Homo sapiens
ASGYSLTDFALHWVRQAPGQRLEWMGWINAGNGNTKFSQQFQGRVTITTYTSATTAYMELSSLRSEDTAVYYCARSRGYSAYEFDYWGQGTLVTVSS

SEQ ID NO: 25850 - protein, 97 aa, Homo sapiens; identical to SEQ ID NO: 25849

SEQ ID NO: 25851 - protein, 97 aa, Homo sapiens
ASGYIFTTYALHWVRQAPGQSLEWMGWINAATGSTFFSQKFQGRVIITRDTSASTAYMELNGLRSEDTAIYYCARSRGYSAYEFDYWGQGILVTVSS

SEQ ID NO: 25852 - protein, 95 aa, Homo sapiens
ASGYTFTSHTMYWVRQAPGQRLEWMGWITAGSGNTKNSQKFQGRVTITRDTSASTTYMELSSLTSEDTAVYYCARGNGSYSLGYWGQGTLVTVSS

SEQ ID NO: 25853 - protein, 95 aa, Homo sapiens; identical to SEQ ID NO: 25852

SEQ ID NO: 25854 - protein, 95 aa, Homo sapiens
ASGYTFTSYAIHWVRQAPGQRLEWMGWINAGNGNTKYSQNFQGRVTIIRDTSASTAYMELSSLRSEDTAVYYCARGNGSYSLGYWGQGTLVTVSS

SEQ ID NO: 25855 - protein, 95 aa, Homo sapiens
ASGYTFTSYAIHWVRQAPGQRLEWMGWINAGNGNTKYSQKFQGRVTIIRDTSASTAYMELSSLRSEDTAVYYCARGNGSYSLGYWGQGTLVTVSS

SEQ ID NO: 25856 - protein, 96 aa, Homo sapiens
AASGFTFDHYVMQWVRQAPGKGLEWVSLISGDAGSTYYADPVKGRFIISRDNSKNSLYLQMNSLKTEDTALYYCATVLWPGGIDYWGQGTLVIVSS

SEQ ID NO: 25857 - protein, 96 aa, Homo sapiens
AGSGFTFDHYVMDWVRQAPGKGPEWVSLISGNGDSTYYADSVKGRFTISRDNSKNSLYLQMNSLRTEDTALYYCATVLWPGGIDYWGQGTLVTVSS

SEQ ID NO: 25858 - protein, 96 aa, Homo sapiens
AGSGFTFDHYVMDWVRQVPGKGLEWVSLISGNGDSTYYADSVKGRFTISRDNSKNSLYLQMNSLRTEDTALYYCATVLWPGGIDYWGQGTLVTVSS

SEQ ID NO: 25859 - protein, 96 aa, Homo sapiens
VGSGFTFDHYVMDWVRQAPGKGPEWVSLISGNADSTYYADSVKGRFTISRDNSKNSLYLQMNSLRTEDTALYYCATVLWPGGIDYWGQGTLVTVSS

SEQ ID NO: 25860 - protein, 96 aa, Homo sapiens
AASGFTFDNYVMQWVRQAPGRGLEWVSLISGVGDSTHYAGSVKGRFTISRDNSKNSLYLQMSSLRAEDTALYYCATVLWPGGIDYWGQGTLVAVSS

SEQ ID NO: 25861 - protein, 96 aa, Homo sapiens
AASGFTFDDYVMQWVRQAPGRGLEWVSLISGVGDSTHYADSVKGRFTISRDNSKNSLYLQMSSLRADDTALYYCATVLWPGGIDYWGQGTLVTVSS

SEQ ID NO: 25862 - protein, 96 aa, Homo sapiens
AASGFTFDNYVMEWVRQRPGRGLEWVSLISGNGDSTHYADSVKGRFTISRDNNKNSLYLQMNSLTSEDTALYYCATVLWPGGIDYWGQGTLVTVSS

SEQ ID NO: 25863 - protein, 97 aa, Homo sapiens
KGSGYTFSDYWIGWVRQMPGKGLEWMGIIYPGDSDTRYSPSFQGQVIISADKSVNTAYLQWSSLKASDTAMYYCARRGGDSEWFDPWGQGTLVTVSS

SEQ ID NO: 25864 - protein, 97 aa, Homo sapiens
KGSGYNFATYWIGWVRQMPGKGLEWMGIIYPGDSDTRYNPSFQGQVTISADKSITTAYLQWSSLKASDTAMYYCARRGGDSEWFDPWGQGTLVTVSS

SEQ ID NO: 25865 - protein, 97 aa, Homo sapiens
KGSGYNFATYWIGWVRQMPGKGLEWMGIIYPGDSDTRYNPSFQGQVTISADKSITTAYLQWSSLKASDTAMYYCARRGGDSEWFDPRGQGTLVTVSS

SEQ ID NO: 25866 - protein, 94 aa, Homo sapiens
AASGFTFSSYSMNWVRQAPRKGLEWVSYISGSSSTIYYAESVKGRLTISRDNAKNSLFLQMNSLRDEDTAVYFCARGPTTFDYWGQGTLVTVSS

SEQ ID NO: 25867 - protein, 94 aa, Homo sapiens
AASRFSFSAYSMNWVRQAPGKGLEWVSYINFDSTTTYYSDSVMGRFTISRDNAKNSLYLQMNSLRDEDTAVYYCARGPTTFDYWGQGTLVAVSS

SEQ ID NO: 25868 - protein, 96 aa, Homo sapiens
TVSGGSISTSSSFWGWIRQPPGKGLEWIASIHHGDTTYYHPSLKSRVTISMDRSENQFSLELTSVTAADTAVYHCVRPRDHGFDDWGRGTLVTVSS

SEQ ID NO: 25869 - protein, 95 aa, Homo sapiens
TVSGGSVSTTSSFWGWIRQSPGKGLEWIASIHHVATTYYNPSLDTRVTISADTSANQFSLTLGSVTAADTAVYHCVRPRDHGFDDWGQGILVTVS

SEQ ID NO: 25870 - protein, 96 aa, Homo sapiens
TVSGGSVRISSTFWGWVRQLPGKGLEWLGSVHSIVTTYYNPSLKSRITISADTSKNQFSLRLTSVTAADTAVYYCVRPRDHGFDDWGQGTLVTVSS

SEQ ID NO: 25871 - protein, 98 aa, Homo sapiens
VASGFTFSGYGMHWVRQAPGKGLEWVSAIWYDGSKTYYGDSVEGRFTISRDDSKSTLYLQMNSLRGEDTAVYYCARDPGTTYYYFDSWGQGTLVTVSS

SEQ ID NO: 25872 - protein, 98 aa, Homo sapiens
AASGYTFSRYGMHWVRQAPGKGLEWVAVIWYDGSKVYYADSVKGRFTISRDDSKSTLYLQMNSLRADDTAVYYCARDPGTTYYYFDSWGQGTLVTVSS

SEQ ID NO: 25873 - protein, 95 aa, Homo sapiens
ASGYTFTDYHIHWVRQAPGQGLEYMGWIYPNSGGTHYAQTFQGWVTMTRDTSISTAYMELNRLRSDDTAVYYCARSGYNWGFDYWGQGTLVTVSS

SEQ ID NO: 25874 - protein, 94 aa, Homo sapiens
SGYNFGGYHIHWMRQAPGQGLEWMGWVYPNSGDSKYAQNFQGRVTMTRDTSISTAYMEVSGLRSDDTAVYYCARSGYNWGFDYWGQGTLVTVSS

SEQ ID NO: 25875 - protein, 96 aa, Homo sapiens
AVSGFTSTTYEFYWVRQAPGMSLEFVSYISRSGGVVQYADSVRGRFSVIRDNAKNSVYLQMDSLRAEDTATYFCARRLPYYGMDLWGQGTTVTVSS

SEQ ID NO: 25876 - protein, 96 aa, Homo sapiens
AVSGFTFSSYEMYWVRQAPGRGLEYLSYVNMRGDTRYYADSVKGRFTVSRDNAKNSVYLEMNSLRADDTAIYYCARRLPYYGMDLWGQGTTVTVSS

SEQ ID NO: 25877 - protein, 96 aa, Homo sapiens
AVSGFTFSSYEMYWVRQAPGRGLEYFSYVNMRGDTRYYADSVKGRFTVSRDNAKNSVYLEMNSLRADDTAIYYCARRLPYYGMDLWGQGTTVTVSS

SEQ ID NO: 25878 - protein, 96 aa, Homo sapiens; identical to SEQ ID NO: 25876

SEQ ID NO: 25879 - protein, 95 aa, Homo sapiens
VSGFTFSSYEMYWVRQAPGRGLEYLSYVNMRGDTRYYADSVKGRFTVSRDNAKNSVYLEMNSLRADDTAIYYCARRLPYYGMDLWGQGTTVTVSS

SEQ ID NO: 25880 - protein, 100 aa, Homo sapiens
AASGFTFSSYAMSWVRQAPGKGLEWVSTISGSGGNTYYEDSVKGRFTISRDNSKKTLYLQLTSLRAEDTAVYYCAKDRWYSSGSDAFDIWGQGTMVTVSS

SEQ ID NO: 25881 - protein, 100 aa, Homo sapiens
AASGFTFSSYAMSWVRQAPGKGLEWVSAISGTSDTTYHADSVKGRFTISRDNSKNTLYLQMNSLRAEDTAVYYCAKDRWYSSGSDAFDIWGQGTMVTVSS

SEQ ID NO: 25882 - protein, 98 aa, Homo sapiens
AASGFTFRDYYMTWIRQAPGKGLEWVSSISIGVTTIDYADSVKGRFTISRDDAKNSLYLHMNSLRAEDTAVYYCARDHPVAGLYFDYWGQGTLVTVSS

SEQ ID NO: 25883 - protein, 97 aa, Homo sapiens
AASGFTFSDFYMSWIRQAPGKGLEWVSYISFTNTIYYADSVKGRFTISRDNAKNSLYLQMNSLRAEDTAVYYCARDHPVAGLYFDYWGQGALVTVSS

SEQ ID NO: 25884 - protein, 98 aa, Homo sapiens
AASGFTFSSYAMSWVRQAPGKGLEWVSAISGSGGSTNDADSVKGRFTISRDNPNNMLYLQMNSLRAEDTAVYYCAKGGATTRYYFDYWGQGTLVTVSS

SEQ ID NO: 25885 - protein, 98 aa, Homo sapiens
AASGFTFSSYAMSWVRQAPGKGLEWVSAISGSGGSTNYADSVKGRFTISRDNSKNTLYLQMNSLRAEDTAVYYCAKGGATTRYYFDYWGQGTLVTVSS

SEQ ID NO: 25886 - protein, 98 aa, Homo sapiens
AASGFTFSSYAMSWVRQAPGKGLEWVSAISGSGGSTNYADSVKGRFTISRDNSKNTLYLQMNSLRAEDTAVYYCAKGGATTRYYFDYWGQGTPVTVSS

SEQ ID NO: 25887 - protein, 98 aa, Homo sapiens
AASGFTFSSYAMSWVRQAPGKGLEWVSAISGSGGSTNYADSVKGRFTISRDNSKNTLSLQMNSLRDEDTAVYYCAKGGATTRYYFDYWGQGTLVTVSS

SEQ ID NO: 25888 - protein, 97 aa, Homo sapiens
ISGDSVSTNSAAWTWIRQSPSRGLEWLGRTYYRSKWYIDYAVSVKSRITIKSDTSKNQFSLQLNSVTPEDTAVYYCAREGTNCFDYWGQGTLVTVSS

SEQ ID NO: 25889 - protein, 97 aa, Homo sapiens
ISGDSVSTNSAAWNWIRLSPSRGLEWLGRTYYRSKWFYDYAVSVKSRITINPDTSKNQFSLQLNSVSPEDTAVYYCAREGTNCFDYWGQGTLVTVSS

SEQ ID NO: 25890 - protein, 97 aa, Homo sapiens
ISGDSVSTNSAAWTWIRQSPSRGLEWLGRTYYRSKWYIDYAVSVKSRITINPDTSKNQFSLQLNSVTPEDTAVYYCAREGTNCFDYWGQGTLVTVSS

SEQ ID NO: 25891 - protein, 97 aa, Homo sapiens
ISGDSVSTSSAAWSWIRQSPSRGLEFLGRTFYRSKWYYDYAVSVKSRISINPDTAKNQFSLQLNSVTPEDTAVYYCAREGTNCFDYWGQGTLVTFSS

SEQ ID NO: 25892 - protein, 97 aa, Homo sapiens
ISGDSVSTSRAAWSWIRQSPSRGLEFLGRTYYRSKWYNDYAVSVKSRITLNPDTSKNQFSLRLNSVTPEDTAVYFCAREGTNCFDYWGQGTLVTVPS

SEQ ID NO: 25893 - protein, 97 aa, Homo sapiens
ISGDSVSTINGAWNWIRQSPSRGLEWLGRTYYRSKWYNDYAVSVRGRIAINPDTSKNQFSLQLNSVTPEDTAVYYCAREGTNCFDYWGQGTLVTVSS

SEQ ID NO: 25894 - protein, 97 aa, Homo sapiens
ISGDSVSTDSAAWNWIRQSPSGGLEWLGRTYYRSKWYHDYAVSVKSRLTISPDTSKNQFSLQLSSVTPEDTAVYFCAREGTNCFDYWGQGTLVTVSS

SEQ ID NO: 25895 - protein, 93 aa, Homo sapiens
AASGFTLSSYAMHWVRQAPGKGLEWVAVISYDGSNKYYADSVKGRFTISRDISKNTVFLQMSSLRPEDTAVYYCARDLTYDYWGQGTLVTVSS

SEQ ID NO: 25896 - protein, 93 aa, Homo sapiens
VASGFTFSNYAMHWVRQAPGKGLEWVAVISYDESNKFYADSVQGRFTISRDNSKNTLYLQMNSLRAEDTAVYYCARDLTYDYWGQGTLVTVSS

SEQ ID NO: 25897 - protein, 94 aa, Homo sapiens
AASGFTFSSYGMHWVRQAPGKGLEWVAVIWYDGSNKYYGDSVKGRFTISRDNSKNTLYLQMNSLRAEDTAVYYCVRAGNAFDVWGQGTMVTVSS

SEQ ID NO: 25898 - protein, 94 aa, Homo sapiens
AASGFTFSSYGMHWVRQAPGKGLEWVAVIWYDGSNKYYGDSVKGRFTISRDNSKNTLSLQMNSLRVEDTAVYYCVRAGNAFDVWGQGTLVTVSS

SEQ ID NO: 25899 - protein, 94 aa, Homo sapiens; identical to SEQ ID NO: 25897

SEQ ID NO: 25900 - protein, 94 aa, Homo sapiens; identical to SEQ ID NO: 25897

SEQ ID NO: 25901 - protein, 94 aa, Homo sapiens
AASGFTFSSYGMHWVRRAPGKGLDWVAVIWYDGSNKYYADSVKGRFTISRDNSKNTLYLQMNTLRVEDTALYYCVRAGNAFDVWGQGAMVTVTS

SEQ ID NO: 25902 - protein, 94 aa, Homo sapiens
AASGFTFSRYAMTWVRQPPGKGLEWVSVIYTNGGSTYYADSVKGRFTISRDNSKNTLYLQMNSLRAEDTAVYYCAKQGREPDYWGQGTLVTVSS

SEQ ID NO: 25903 - protein, 94 aa, Homo sapiens
VASGFTFSTYTMTWVRQAPGKGLEWVSLITSAGTATSYAGSVRGRFTISRDNSKNTLYLQMNSLRAEDTAVYYCAKQGREPDYWGQGTLVTVSS

SEQ ID NO: 25904 - protein, 94 aa, Homo sapiens; identical to SEQ ID NO: 25903

SEQ ID NO: 25905 - protein, 93 aa, Homo sapiens
AASGFSFSNYWMTWIRQAPGKGLEWVANIRHDGREKYYVDSVKGRFTVSRDNAKNSLYLQMNSLRVEDTAVYYCARHKGLEYWGQGTLVTVSS

SEQ ID NO: 25906 - protein, 93 aa, Homo sapiens
AASGFTFGSYWMTWVRQAPGKGLEWVANINPDGRRKYYVDSVKGRFTISRDNAKNSLFLQMNSLRVEDTAVYYCARHKGLEYWGQGTLVTVSS

SEQ ID NO: 25907 - protein, 92 aa, Homo sapiens
ASGFTFSRFWMTWVRQAPGKGLEWVANIKEDGREKYYVDSVKGRFTISRDNAKNSLYLQMNSLRAEDTAVYYCARHKGLEYWGQGILVTVSS

SEQ ID NO: 25908 - protein, 92 aa, Homo sapiens; identical to SEQ ID NO: 25907

SEQ ID NO: 25909 - protein, 102 aa, Homo sapiens
AASGFTFSTSWMSWVRQAPGKGLEWVANIKQDGSENSCVDSVKGRFTISRDNAKNSLYLQMNSLRAEDTAVYYCARGPTYCGGDCYYYFDYWGQGTLVTVSS

SEQ ID NO: 25910 - protein, 102 aa, Homo sapiens
AASGFTFSSYWMSWVRQAPGKGLEWVANIKQDGSEKSYVDSVKGRFTISRDNPKNSLYLQMNSLRAEDTAVYYCARGPTYCGGDCYYYFDYWGQGTLVPVSS

SEQ ID NO: 25911 - protein, 102 aa, Homo sapiens
AASRFTFSSYWMSWVRQAPGKGLEWVANIKQDGSEKSYVDSVKGRFTISRDNAKNSLYLQMNSLRAEDSAVYFCARGPTYCGGDCYYYFDYWGQGTLVTVSS

SEQ ID NO: 25912 - protein, 102 aa, Homo sapiens
AASGFTFRSYWMSWVRQTPGKGLEWVANIKQDGGEKDYVDSVKGRFTISRDNAKNSLYLQMNSLRAEDTAVYYCARGPTYCGGDCYYYFDYWGQGTLVTVSS

SEQ ID NO: 25913 - protein, 94 aa, Homo sapiens
EASGFTFSSYGMSWVRQAPGKGLEWVSAISGTGVSRYYADSEKGRFTISRDNSKNTLFLQMNSLRAEDTAVYYCAKGGSYMDYWGQGTLVTVSS

SEQ ID NO: 25914 - protein, 92 aa, Homo sapiens
AASGFTFSIYAMSWVRQAPGKGLEWVSSITGGGTYYADSVKGRFTISRDNSKNTLYLQMSSLRAEDTAVFYCAKGGSYMDYWGQGTLVTVSS

SEQ ID NO: 25915 - protein, 92 aa, Homo sapiens
AASDFTFSNYAMSWVRQAPGKGLEWVSGISGSGDNTYYADSVKGRFTISRDNSKNTLYLQMSSLRVEDTAVYYCAKGGGGSWGQGTLVTVSS

SEQ ID NO: 25916 - protein, 92 aa, Homo sapiens
AASGFTFSSYDMNWVRQTPGKGLEWVSGIGRRGFLTSYADSVKGRFTISRDNSKNTVFLQMDSLRAEDTAVYYCAKGGGGSWGQGTLVIVSS

SEQ ID NO: 25917 - protein, 91 aa, Homo sapiens
AASGFTFSSYEMNWVRQAPGKGLEWVSFISSSGGTIYYADSVKGRFTISRDNAKNSLYLQMNSLRAEDTAVYYCARKGDHWGQGTLVTVSS

SEQ ID NO: 25918 - protein, 91 aa, Homo sapiens
AASGFTFSSYDMNWVRQAPGKGLEWVSYISGSGSAISYADSVKGRFTISRDNAKNSLYLQMNSLRVEDTAVYYCARKGDHWGRGTLVTVSS

SEQ ID NO: 25919 - protein, 91 aa, Homo sapiens
AASGFIFSNYEMNWVRQAPGKGLEWVSYINSGGTTIYYADSVKGRFTISRDNARNSLYLQMNSLRAEDTAVYYCARKGDHWGQGTLVTVSS

SEQ ID NO: 25920 - protein, 95 aa, Homo sapiens
AASGFTFSRSWMAWVRQAPGKGLEWVAKIKTDGSDKYYEDSVRGRFTISRDNAKNSLYLQMNSLRGDDTAVYYCATNINWCFDSWGQGTLVTVSS

SEQ ID NO: 25921 - protein, 95 aa, Homo sapiens
AASGFAFSRAWMAWVRQAPGKGLEWVAKIKPDGIERYYVDSVRGRFTISRDNAKNSLYLQMNSLRGDDTAVYYCATNINWCFDSWGQGTLVSVSS

SEQ ID NO: 25922 - protein, 95 aa, Homo sapiens
AASGFTFSRSWMAWVRQAPGKGLEWVAKIKTDGSDKYYVDSVRGRFTISRDNAKNSLYLQMNSLRGDDTAVYYCATNINWCFDSWGQGTLVTVSS

SEQ ID NO: 25923 - protein, 94 aa, Homo sapiens
AASGFAFSRAWMAWVRQAPGKGLEWVAKIKPDGIERYYVDSVRGRFTISRDNAENSLYLQMNSLRGDDTAVYYCATNINWCFDSWGQGTLVSVS

SEQ ID NO: 25924 - protein, 95 aa, Homo sapiens; identical to SEQ ID NO: 25921

SEQ ID NO: 25925 - protein, 95 aa, Homo sapiens
AASGFAFSRSWMAWVRQAPGKGLEWVAKIKTDGSESYYVDSVRGRFTISRDNAKNSLYLQMNSLRGDDTAVYYCATNINWCFDSWGQGTLVSVSS

SEQ ID NO: 25926 - protein, 95 aa, Homo sapiens
AASGFTFSRSWMAWVRQAPGKGLEWVAKIKPDGSERYYVDSVRGRFTISRDNAKNSLYLQMNSLRGDDTAVYYCATNINWCFDSWGQGTLVSVSS

SEQ ID NO: 25927 - protein, 95 aa, Homo sapiens; identical to SEQ ID NO: 25926

SEQ ID NO: 25928 - protein, 95 aa, Homo sapiens
AASGFAFSRAWMAWVRQAPGKGLEWVAKIKPDGSERYYVDSVRGRFTISRDNAKNSLYLQMNSLRGDDTAVYYCATNINWCFDSWGQGTLVSVSS

SEQ ID NO: 25929 - protein, 95 aa, Homo sapiens
AASGFAFSRSWMAWVRQAPGKGLEWVAKIKTDGSERHYVDSVRGRFTISRDNAKKSLYLQMNSLRGDDTAVYYCATNINWCFDSWGQGTLVSVSS

SEQ ID NO: 25930 - protein, 95 aa, Homo sapiens
AASGFAFSRSWMAWVRQAPGKGLEWVAKIKTDGSERHYVDSVRGRFTISRDNARNSLYLQMNSLRGDDTAVYYCATNINWCFDSWGQGTLVSVSS

SEQ ID NO: 25931 - protein, 95 aa, Homo sapiens; identical to SEQ ID NO: 25926

SEQ ID NO: 25932 - protein, 95 aa, Homo sapiens
AASGFTFSRSWMAWVRQAPGKGLEWVAKIKTDGSESHYVASVRGRFTISRDNAKNSLYLQMNSLRGDDTAVYYCATNINWCFDSWGQGTLVIVSS

SEQ ID NO: 25933 - protein, 95 aa, Homo sapiens
AASGFAFSRAWMAWVRQAPGKGLEWVAKIKPDGIESYYVDSVRGRFTISRDNAKNSLYLQMNSLRGDDTAVYYCATNINWCFDSWGQGTLVSVSS

SEQ ID NO: 25934 - protein, 95 aa, Homo sapiens
AASGFAFSRSWMAWVRQAPGKGLEWVAKIKPDGRERDYVDSVRGRFTISRDNAKNSLYLQMNSLRGDDTAVYYCATNINWCFDSWGQGTLVSVSS

SEQ ID NO: 25935 - protein, 97 aa, Homo sapiens
ASGFTFSFYAMSWVRQAPGKGPEWVSTIGGGGTETYNADSVKGRFTISRDNSKNTLYLQMNSLRADDTAVYYCAKGPGTGYSGMDVWGQGTTATVSS

SEQ ID NO: 25936 - protein, 98 aa, Homo sapiens
AASGLTFRYFAMSWVRQAPGTGLEWVSTIGGGGIITYYDDSVKGRFTISRDNAKDTLFLQMSSLRAEDTAVYYCAKGPGTGYSGMDVWGQGTTVTVYS

SEQ ID NO: 25937 - protein, 92 aa, Homo sapiens
ASGFTFRSFSMNWVRQAPGKGLEWVAKIKQDGSEKDYVDSVRGRFTISRDNAKNSLYLQMNSLRVEDTAVYYCARSARGDYWGQGTPVTVSS

SEQ ID NO: 25938 - protein, 93 aa, Homo sapiens
AASGFTFSNHWMSWVRQAPGKGLEWVAIIKQDGSEKNSVDSVKGRFTISRDNTKNSLFLQMNSLRVEDTAVYYCARSARGDYWGQGTLVTVSS

SEQ ID NO: 25939 - protein, 97 aa, Homo sapiens
AATGFTFSSYWISWVRQAPGKGLEWVANTNEDGSEKYYVDSVKGRFTISKDNAKNSLYLQMNSLRAEDTAVYYCARGTVTTPGMDVWGQGTTVTVSS

SEQ ID NO: 25940 - protein, 97 aa, Homo sapiens; identical to SEQ ID NO: 25939

SEQ ID NO: 25941 - protein, 97 aa, Homo sapiens
AASGFSFSGYWMNWVRQAPGKGLEWVANTNEDGSGKFYVDSVKGRFTISRDNAKNSLYLQMNSLRAEDMAVYYCARGTVTTPGMDVWGLGATVTVSS

SEQ ID NO: 25942 - protein, 97 aa, Homo sapiens; identical to SEQ ID NO: 25941

SEQ ID NO: 25943 - protein, 97 aa, Homo sapiens
TVSGVSISSSSYYWGWIRQAPGKGLEWIGNIYYSGSTYQNPSLKSRVTISVDTSKNQLSLKLSSVTAADTAVYYCARHVSHTAMDYWGQGTLVTVSS

SEQ ID NO: 25944 - protein, 96 aa, Homo sapiens
VSGVSISSSSYNWVWIRQPPGKGLEWIGSIYYSGSTYYNPSLESRVAISVDTSKNQFSLKLSSVTAADTAVYYCARHVSHTAMDYWGQGTLVTVSS

SEQ ID NO: 25945 - protein, 96 aa, Homo sapiens; identical to SEQ ID NO: 25944

SEQ ID NO: 25946 - protein, 92 aa, Homo sapiens
TVSGGSISSSSYYWGWIRQPPGKGLEWIGIIYYSGSTYYNPSLKSRVTISIDTSKNQFSLKLSSVTAADTAVYYCARRGEYWGQGTLVTVSS

SEQ ID NO: 25947 - protein, 92 aa, Homo sapiens
TVSGGSISSSSYYWGWIRQPPGKGLEWIGIIYYNGSTYYNPSLKSRVTISVDTSKNQFSLKLSSVTAADTAVYYCARRGEYWGQGTLVTVSS

SEQ ID NO: 25948 - protein, 92 aa, Homo sapiens
TVSGGSISSSSYYWGWIRQPPGKGLEWIGIIYYSGSTYYNPSLKSRVTISVDTSKNQFSLKLSSVTAADTAVYYCARRGEYWGQGILVTVSS

SEQ ID NO: 25949 - protein, 92 aa, Homo sapiens
SVSGGSITSDSYYWGWIRQPPGKGLEWIGIIYYSGTTYYNPSLKSRVTIFIDTSKNQFSLNLTSVTASDTAVYYCARRGEYWGQGILVTVSS

SEQ ID NO: 25950 - protein, 92 aa, Homo sapiens
TVSGGSISSSNYYWGWIRQPPGKGLEWIGIIYYNGSTYYNPSLKSRVTISVDASKNQFSLKLNSVTAADTAVYYCARRGEYWGQGSLVTVSS

SEQ ID NO: 25951 - protein, 92 aa, Homo sapiens
TVSGGSLSGDNYYWGWIRQPPGKGLEWIGIIYYSGRTHYNPSLESRVTISIDTSKNQFSLKLSSVTAADTAVYYCARRGEYWGHGTLVTVSS

SEQ ID NO: 25952 - protein, 92 aa, Homo sapiens
TVSGGSISSIIYYWGWIRQPPGKGLEWIGSIYYSGNTSYNPSLKSRVTISVDTSKNQISLKLSSVTAADTAVYYCARRGEYWGQGTLVTVSS

SEQ ID NO: 25953 - protein, 92 aa, Homo sapiens
TVSGGSISSGIYYWGWIRQPPGKGLEWIGSIYFSGNTYYNPSLKSRVTISVDTSKNQFSLKLSSVTAADTAVYYCARRGEYWGQGTLVTVSS

SEQ ID NO: 25954 - protein, 92 aa, Homo sapiens
TVSGGSISSSSYYWGWIRQPPGKGLEWIGSIYYSGNTYYNPSLKSRVTISVDTSKNQFSLKLSSVTAADTAVYYCARRGEYWGQGTLVTVSS

SEQ ID NO: 25955 - protein, 92 aa, Homo sapiens
TVSGGSISSGNYYWGWIRQPPGKGLEWIGIIYYSGSTYYNPSLKSRVTISVDTSKNQFSLKLRSVTAADTAVYYCARRGEYWGQGTLVTVSS

SEQ ID NO: 25956 - protein, 95 aa, Homo sapiens
TVSGGSISSGSYYWGWIRQPPGKGLEWIGYIYYSGNSGNTYYNPSLKSRVTISVDMSKNQFSLKLSSVTAADTAVYYCARRGEYWGQGTLVTVSS

SEQ ID NO: 25957 - protein, 92 aa, Homo sapiens; identical to SEQ ID NO: 25952

SEQ ID NO: 25958 - protein, 98 aa, Homo sapiens
AASGFSFRTHSMNWVRQAPGKGLEWISWISDGGGTIFYADSVKGRFTISRDDDKTTVYLQMKSLRDEDTAVYYCASDGVGVVPGDVFDIWGQGTLVTV

SEQ ID NO: 25959 - protein, 100 aa, Homo sapiens
AASGFSFRTHSMNWVRQAPGKGLEWLSWIADGGGTKFYADSVKGRFTISRDDAKTTVYLQMNSLRDDDTAVYYCASDGVGVVPGDVFDIWGQGTLVTVSS

SEQ ID NO: 25960 - protein, 100 aa, Homo sapiens
GASGFTFNSHSFNWVRQAPGKGLEWVSFISNIGDTTYYADSVKGRFTISRDNAKRSVYLQMNSLREEDTAVYFCASDGVGVVPGDVFDIWGQGTMVTVSS

SEQ ID NO: 25961 - protein, 96 aa, Homo sapiens
AASGFTFSTYATHWVRQAPGKGLEWVAVISYDGSNKYYADSVKGRFTISRDNSKNTLYLQMSSLRVEDTAIYYCTRGPSGSYFDYWGQGTLVTVSS

SEQ ID NO: 25962 - protein, 96 aa, Homo sapiens
AASGFIFITYAIHWVRQAPGKGLQWVAVISKDGSNKYYADSVKGRFTISRDNSRATLHLQMNSLRAEDTAVYYCTRGPSGSYFDYWGQGTLVTVSS

SEQ ID NO: 25963 - protein, 96 aa, Homo sapiens
GASEFTFSSYAIHWVRQAPGKGLEWVAVISKDGSNRYYADSVKGRFTVSRDNSKNTLYLQMDSLRADDTAVYYCTRGPSGSYFDYWGQGTLVTVSS

SEQ ID NO: 25964 - protein, 99 aa, Homo sapiens
TVSRGSIRSYYWGWIRQPPGKGLEWIGYIYYSGSTNYNPSLKSRVTISVDTSKNQFSLKLSSVTAADTAVYYCARVPPIVGTTTVFDYWGQGTLVTVSS

SEQ ID NO: 25965 - protein, 99 aa, Homo sapiens
TVSGGSIRNYYWGWIRQPPGKGLEWIGYIYYSGSANYNPSLKSRVTMSVDTSKNQFSLKLNSVTTADTAVYFCARVPPIVGTTTVFDYWGQGTLITVSS

SEQ ID NO: 25966 - protein, 95 aa, Homo sapiens
AASGFTFSNYWMSWLRQAPGKGLEWVANINEDASKKYYVDSVKGRFTVSRDNAKNSLYLQMNTLTAEDTAVYYCARGGWYYFDSWGQGTLVTVSS

SEQ ID NO: 25967 - protein, 95 aa, Homo sapiens
AASGFTFSNYWMSWLRQAPGKGLEWVANINEDATKKYYEDSVKGRFTVSRDNAKNSLYLQMNTLTAEDTAVYYCARGGWYYFDSWGQGTLVTVSS

SEQ ID NO: 25968 - protein, 95 aa, Homo sapiens
AASGFTFSTYWMSWVRQAPGKGLEWVANIKQDGSDIYYVDSVKGRFVISRDNARNSLYMQMSSLRAEDTAVYYCARGGWYYFDSWGQGTQVTVSS

SEQ ID NO: 25969 - protein, 95 aa, Homo sapiens
AASGFTFSTYWMSWVRQAPGKGLEWVDNIKQDGSDIYYVESVKGRFVISRDNARNSLYMQLSSLRAEDTAVYFCARGGWYYFDSWGQGTQVTVSS

SEQ ID NO: 25970 - protein, 95 aa, Homo sapiens
AASGFTFSTYWMSWVRQAPGKGLEWVANIKQDGSDIYYVESVKGRFVISRDNARNSLYMQLSSLRAEDTAVYFCARGGWYYFDSWGQGTQVTVSS

SEQ ID NO: 25971 - protein, 97 aa, Homo sapiens
AASGFTFSTYGMHWVRQAPGKGLEWVAVISSDGNVKYYADSMMGRFTLSRDNSKNTLYMQMNSLRAEDTAVYYCAKEIAVADFFDYWGQGTLVTVSS

SEQ ID NO: 25972 - protein, 97 aa, Homo sapiens
AASGFTFSAYGIHWVRQAPGKGLEWMAVISSDGSRQYYADSVKGRFTISRDNSKNTLFLQINSLRAEDTAVYYCAKEIAVADFFDYWGQGTLVTVSS

SEQ ID NO: 25973 - protein, 98 aa, Homo sapiens
KGSGYSFPFYWIGWVRQMPGKGLEWMGVIYPRDSNTIYSPSFQGQVTISVDKSIGTAYLQWSSLKAPDTAMYYCARQDGDAKYYFDYWGQGTLVTVSS

SEQ ID NO: 25974 - protein, 98 aa, Homo sapiens
KGSGYSFTYYWIAWVRQMPGKGLEWMGIIYPGESNTRYSPSFQGQVTISVDKSIGTAYLQWSSLKASDTAMYYCARQDGDAKYYFDYWGQGTLVIVSS

SEQ ID NO: 25975 - protein, 98 aa, Homo sapiens
KGSGYSFPFYWIGWVRQMPGKGLEWMGIIYPGDSNTRYSPSFQGQVTISVDKSIGTAYLQWSSLKAPDTAMYYCARQDGDAKYYFDYWGQGTLVTVSS

SEQ ID NO: 25976 - protein, 98 aa, Homo sapiens
KGSGYSFPFYWIGWVRQMPGKGLEWMGIIYPGDSKSRYSPSFQGQVTISVDKSIGTAYLQWSSLKAPDTAMYFCARQDGDAKYYFDYWGQGTLVTVSS

SEQ ID NO: 25977 - protein, 98 aa, Homo sapiens; identical to SEQ ID NO: 25975

SEQ ID NO: 25978 - protein, 98 aa, Homo sapiens
KGSGYSFTYYWIAWVRQMPGKGLEWMGIIYPGDSKTKYSPSFQGQFTISADKSTSTAYLQWSSLQASDTAIYYCARQDGDAKYYFDYWGQGTLVTVSS

SEQ ID NO: 25979 - protein, 99 aa, Homo sapiens
AASGFSFSIYAMHWVRQAPGKGLEWVAVISYDGSDKFYADSVKGRFTISRDNSKNTLYLQMNSLRTADTAVYYCARESRQQLVSWFDPWGQGTLVTVSS

SEQ ID NO: 25980 - protein, 99 aa, Homo sapiens
AASGFTFSNYAIHWVRQAPGKGLEWVAVISYDGRDKFYADSVKGRFTISRDNSKNTLYLQMSSLRAEDTAVYYCARESRQQLVSWFDPWGQGTLVTVSS

SEQ ID NO: 25981 - protein, 99 aa, Homo sapiens
GVFGFTFSNYAFHWVRQAPGKGLEWVAVISHDGSVQFYEDSVKGRFTFSRDNSKNTLYLQMDSLRDEDTAVYYCARESRQQLVSWFDPWGQGTLVIVSS

SEQ ID NO: 25982 - protein, 99 aa, Homo sapiens
AVSGFTFSNYAFHWVRQAPGKGLEWVAVISYDGSVTFYSDSVKGRFTFSRDNSKNTLYLQMNSLRDDDTAMYYCARESRQQLVSWFDPWGQGTLVTVSS

SEQ ID NO: 25983 - protein, 97 aa, Homo sapiens
AASGFRLSDSWMSWVRQAPGKGLEWVANIKQDGSDKYYVDSVKGRFTISRDTAKNSLFLQMNSLRAEDTAVYYCAREKPYGDCFDYWGQGTLVTVSS

SEQ ID NO: 25984 - protein, 97 aa, Homo sapiens; identical to SEQ ID NO: 25983

SEQ ID NO: 25985 - protein, 97 aa, Homo sapiens
AASGFIFSHSWMSWVRQAPGKGLEWVAAIKQDGSEKFYVDSVKGRFAISRDNAENSLFLQMNSLRAEDTAVYYCAREKPYGDCFDYWGQGTLVTVSS

SEQ ID NO: 25986 - protein, 95 aa, Homo sapiens
TVSGGSISSSNYYWAWIRQPPGKGLEWIGMMHYSGSTYYNPSLQSRVTISVDTSKNHISLKVRSVTGADTAVYYCATRGSNFDYWGQGTLVTVSS

SEQ ID NO: 25987 - protein, 95 aa, Homo sapiens
TVSGGSISSGSYYWGWIRQTPGKGLEWIGSFYYTGTTYYNPSLKSRVTISVDPSKQKFSLTLRSVTAADAAVYFCATRGSNFDYWGQGTLVIVSS

SEQ ID NO: 25988 - protein, 97 aa, Homo sapiens
AASGFTVSSNYMVWVRQAPGKGLEWVSVIYTGGSTYYADSVKGRFTISRDNSKNTLYLQMNSLRAEDTAVYYCAGVDNSGWYCFDYWGQGTLVTASS

SEQ ID NO: 25989 - protein, 97 aa, Homo sapiens
AASGITVSSNYMSWVRQAPGKGLEWVSLIYSDGSTFYADSVKGRLTISRHNSKNTLYLQMNSLRTEDTAVYYCAGVDNSGWYCFDYWGQGILVTVSS

SEQ ID NO: 25990 - protein, 97 aa, Homo sapiens
AASGFTVSSNYMGWVRQAPGKGLEWVSVIYTGGSTYYADSVKGRFTISRDNSKNTLYLQMNSLRAEDTAVYYCAGVDNSGWYCFDYWGQGTLVTASS

SEQ ID NO: 25991 - protein, 94 aa, Homo sapiens
AASGFTFSSYGMHWVRQAPGKGLEWVAVIWYDGSNKYYADSVKGRFTISRDNSKNTLYLQMNSLRAEDTAVYYCARYSSGYDYWGQGTLVTVSS

SEQ ID NO: 25992 - protein, 94 aa, Homo sapiens
AASGFTFSSYGMHWVRQAPGKGLEWVAVIWYDGSNKYYADSVKGRFTISRDNSKNTLYLQMSSLRVEDTAVYYCARYSSGYDYWGQGTLVTVSS

SEQ ID NO: 25993 - protein, 97 aa, Homo sapiens
AVSGFTFSNEWMGWVRQAPGKGLEWVGRIKRTIDGGTTDYAAPVKGRFTISRDDSRNTLYLQLNSLKIEDTAVYYCTTDPPGASDYWGQGAQVTVSS

SEQ ID NO: 25994 - protein, 97 aa, Homo sapiens
AVSGFTFNNEWMSWVRQAPGKGLEWVGRIKTKAEGGTTDYASVVKDRFTISRDDSKSTLYLQMNSLRTEDTGLYYCTTDPPGASDYWGQGTLVTVSS

SEQ ID NO: 25995 - protein, 95 aa, Homo sapiens
AASGFTFSTYTMNWVRQAPGKGLEWVSNIRTNEGTMHYADSVKGRFTISRDDAKNSLFLQMNSLRDEDTAVYFCARDFQWAFDHWGQGILVTVSS

SEQ ID NO: 25996 - protein, 96 aa, Homo sapiens
AASGFRFTTYSFNWVRQAPGKGLEWLAYVGSGPSRPINYADSVRGRFTISRDDGDNSVFLQMNNLRDDDTAVYFCARDFQWAFDHWGQGALVTVSS

SEQ ID NO: 25997 - protein, 93 aa, Homo sapiens
AVSGFTFSSSWMSWVRQAPGKGLEWVANIKQDGSEKNYVDSVKGRFTISRDNAKNSLNLQMNSLRAEDTGVYYCARDRGGSSWGQGTLVTVSS

SEQ ID NO: 25998 - protein, 93 aa, Homo sapiens
AASEFTFSRSWMSWVRQAPGKGLEWVANIKQDGSEKYYVDSVKGRFTISRDNAKNSLYLQMNSLRAEDTAVYYCARDRGGSSWGQGTLVTVSS

SEQ ID NO: 25999 - protein, 93 aa, Homo sapiens
VASGFTFSAYYMTWIRQAPGKGLEWVSYITSSSYTNYADSVKGRFTISRDNAKNSLYLQMNSLRAEDTAVYYCVRDSYGLDYWGQGTLVTVSS

SEQ ID NO: 26000 - protein, 94 aa, Homo sapiens
AASGFTIRLYYMGWIRQAPGKGLEWVSYITSSPSTMYYADSVKGRFTISRDDAKNSVFLQMNSLRAEDTAVYYCVRDSYGLDYWGQGNLVTVSS

SEQ ID NO: 26001 - protein, 96 aa, Homo sapiens
AASGFTFSFSDYYMGWIRQAPGKGLDWVSYITSGGSNIYYAESVKGRFTISRDDAKNSLYLQMKSLRAEDTAVYYCVRDSYGLDYWGQGTLVTVSS

SEQ ID NO: 26002 - protein, 94 aa, Homo sapiens
AASGFTIRDYYLGWVRQAPGKGLEWVSYITSIPSTLYYADSVKGRFTISRDDAKNSVFLQMNSLRAEDTAVYYCVRDSYGLDYWGQGTLVTVSS

SEQ ID NO: 26003 - protein, 94 aa, Homo sapiens
VASGFTIRDYYLGWIRQAPGKGLEWVSYITSSPSTMYYADSVKGRFTISRDNAKNSVFLQMNSLRAEDTAVYYCVRDSYGLDYWGQGTLVTVSS

SEQ ID NO: 26004 - protein, 96 aa, Homo sapiens
AASGFTFSFSDYYMGWIRQAPGKGLDWVSYITSGGSTIYYAESVKGRFTISRDDAKKSLYLQMKSLRAEDTAVYYCVRDSYGLDYWGQGTLVTVSS

SEQ ID NO: 26005 - protein, 94 aa, Homo sapiens
AASGFTIRDYYMGWIRQAPGKGLEWVSYITSSPSTMYYADSVKGRFTISRDNAKNSVFLQMNSLRAEDTAVYYCVRDSYGLDYWGQGTLVTVSS

SEQ ID NO: 26006 - protein, 94 aa, Homo sapiens
VASGFTIRDYYLGWIRQAPGKGLEWVSYITSSPSTMYYTDSVKGRFTISRDDAKNSVFLQMNSLRAEDTAVYYCVRDSYGLDYWGQGTLVTVSS

SEQ ID NO: 26007 - protein, 94 aa, Homo sapiens; identical to SEQ ID NO: 26006

SEQ ID NO: 26008 - protein, 94 aa, Homo sapiens
AASGFTIRPYYMGWIRQAPGKGLEWVSYITSSPSTMYYADSVKGRFTISRDDAKNSVFLQMNSLRAEDTAVYYCVRDSYGLDYWGQGNLVTVSS

SEQ ID NO: 26009 - protein, 92 aa, Homo sapiens
ASGFTFSPYYMTWIRQAPGKGLEWVSYITSSSYTNYADFVKGRFTISRDNAKNSLYLQMNSLRAEDTAVYYCVRDSYGLDYWGQGTLVTVSS

SEQ ID NO: 26010 - protein, 92 aa, Homo sapiens
ASGFTFSAYYMTWIRQAPGKGLEWVSYITSSSYTNYADFVKGRFTISRDNAKNSLYLQMNSLRAEDTAVYYCVRDSYGLDYWGQGTLVTVSS

SEQ ID NO: 26011 - protein, 94 aa, Homo sapiens
AASGFSFSDYYMNWIRQAPGKGLEWLSYISDRGNYTDYADSVKGRLTISRDNAKNSLYLQMNSLRAEDTAVYYCARGSGKLDYWGQGTLVTVSS

SEQ ID NO: 26012 - protein, 94 aa, Homo sapiens
AASGFSFSDYYMSWVRQTPGKGLEWISYISNSGGTIYNEDTVKGRFTISRDNAKNSLYLQMNSLRAEDTAIYYCARGSGKLDYWGQGTLVIVSS

SEQ ID NO: 26013 - protein, 95 aa, Homo sapiens
AASGFIFSDYPMNWVRQTPGRGLEWVSQFRSSGRMIYYADSVKGRFTISRDNAKNSLFLQMNSLRDEDTAVYYCARDHQWGFDYWGQGILVTVSS

SEQ ID NO: 26014 - protein, 94 aa, Homo sapiens
AASGFTFSPYAMNWVRQAPGKGLEWVAYISPTYAIYYGDSVKGRFTISRDNAKDSVYLQMHSLRDEDTAVYFCARDHQWGFDYWGQGTLVTVSS

SEQ ID NO: 26015 - protein, 99 aa, Homo sapiens
AASGFTFSRSWMSWVRQAPGKGLEWVANINEDGSEKYYLDSVKGRFTISRDNAKNSLYLQMNSLRAEDTAVYYCARELVVGPAEYFQHWGQGTLVTVSS

SEQ ID NO: 26016 - protein, 99 aa, Homo sapiens
AASGFTFSGSWMSWVRQSPGKGLEWVANINRQGSEKYYVDSVKGRFTISRDNTKNSLYLQMNSLRPEDTAVYYCARELVVGPAEYFQHWGQGTLVTVSS

SEQ ID NO: 26017 - protein, 99 aa, Homo sapiens
AASGFTFSGSWMSWVRQSPGKGLEWVANINRQGSEKYYVDSVKGRFTISRDNTKNSLYLQMNSLRPEDTAVYYCARELVVGPAEYFQHRGQGTLVTVSS

SEQ ID NO: 26018 - protein, 99 aa, Homo sapiens
AGSGFTFSSSWMSWVRQLPGKGLEWVANINQDGSEKYFVGSVKGRFTISRDNAKNSLYLQMNSLRAEDTAVYYCARELVVGPAEYFQHWGQGTVVIVSS

SEQ ID NO: 26019 - protein, 97 aa, Homo sapiens
AASGFTFSNAWMNWVRQAPGKGLEWLGRVKSKSDAETTDYAAPAKGRFTISRDDSKNTLYLQMNSLKIEDTAMYYCTTRVRTTNDHWGQGTLVTVSS

SEQ ID NO: 26020 - protein, 96 aa, Homo sapiens
ATSGFTFSNVWMNWVRQTPGKGLEWLGRIKTKTEGATIDSVAPVKGRFTISRDDSKNTLYLEMNSLQIEDTAVYYCTTRVRTTNDHWGQGTLVTVS

SEQ ID NO: 26021 - protein, 97 aa, Homo sapiens
AASGFSFSDVWMNWVRQAPGKGPEWIGRVKSKSDGETTDYSAPAKGRFTISRDDSRNTLYLQMNSLQTEDTALYYCTTRVRTTNDHWGQGTLVTVSS

SEQ ID NO: 26022 - protein, 99 aa, Homo sapiens
AASGFTFNSHAMSWVRQAPGKGLEWVSAISGSGGSTYYADSVKGRFTISRDNSKNTLYLQMNSLRAEDTAVYYCAKGRGSSSWYFFDYWGQGTLVTVSS

SEQ ID NO: 26023 - protein, 99 aa, Homo sapiens
AASGFTFSSYAMGWVRQAPGKGLEWVSAISDSGGSTYYADSVRGRFTISRDNSKNTLYLQMNSLRVEDTAVYYCAKGRGSSSWYFFDYWGQGTLVTVSS

SEQ ID NO: 26024 - protein, 99 aa, Homo sapiens; identical to SEQ ID NO: 26023

SEQ ID NO: 26025 - protein, 95 aa, Homo sapiens
AVYGGTFSGYYLSWIRQPPGKGLEWIGEINDSGSTSYNPSLKSRVTISVDTSKNQFSLKLSSVTAADTAVYYCARGPMLGWFDPWGQGTLVTVSS

SEQ ID NO: 26026 - protein, 95 aa, Homo sapiens
AVYGGSFSGYYWSWIRQPPGKGLEWIGEMNHSGSTNYNPSLKSRVTISVDTSKNQFSLKLSSVTAADTAVYYCARGPMLGWFDPWGQGTLVTVSS

SEQ ID NO: 26027 - protein, 98 aa, Homo sapiens
EVSGFTFSSYWMNWVRQAPGKGLEWVANIKYDGTEKYYVDSVKGRFTISRDNAKNSLYLQLNSLRAEDTSMYYCARDHVAPGIIFDNWGQGTLVTVSS

SEQ ID NO: 26028 - protein, 98 aa, Homo sapiens
EVSGFTFSSYWMNWVRQAPGKGLEWVANIKYDGSEKYYVDSVKGRFTISRDNAKNSLYLQMNSLRAEDTSMYYCARDHVAPGIIFDNWGQGTLVTVSS

SEQ ID NO: 26029 - protein, 98 aa, Homo sapiens; identical to SEQ ID NO: 26028

SEQ ID NO: 26030 - protein, 98 aa, Homo sapiens
EVSGFSFSSHWMNWVRQAPGKGLEWVANINQDGSEKYYLDSVKGRFTISRDNAKNSLYLQVSSLRAEDTAVYYCARDHVAPGIIFDNWGRGTLVTVSS

SEQ ID NO: 26031 - protein, 98 aa, Homo sapiens
EVSGFTFSSYWMNWVRQAPGKGLEWVANIKYDGSERYYVDSVKGRFTISRDNAKNSLYLQMDSLRAEDTSMYYCARDHVAPGIIFDNWGQGTLVTVSS

SEQ ID NO: 26032 - protein, 98 aa, Homo sapiens
VASGFTFSSYWMNWVRQAPGKGLEWVANIKQDGSEKYYLDSVKGRFTISRDNAKNSLFLQMSSLRVEDTAVYYCARDHVAPGIIFDNWGQGVLVTVSS

SEQ ID NO: 26033 - protein, 97 aa, Homo sapiens
AASGFIFSNYGMHWVRQAPGKGLEWVAIIWYDGSQKYYADSVKGRFTISRDDSKNMLYLQMNSLRAEDTAVYYCARDLSYGSGSYEGGQGTLVTVSS

SEQ ID NO: 26034 - protein, 97 aa, Homo sapiens
AASGFTFSNYGMHWVRQAPDKGLEWVAVIWYDGSKRYYADSVKGRFTISRDDSKNTLYLQMNSLRVEDTAVYYCARDLSYGSGSYEGGQGTLVTVSS

SEQ ID NO: 26035 - protein, 93 aa, Homo sapiens
AASGFTFSIYVMSWVRQAPGKGLEWVSAISGNGATTYYADSVKGRFTVSRDNSKNTLFLQMNSLRVEDTAVYYCARRHRPDYWGQGTLVTVSS

SEQ ID NO: 26036 - protein, 93 aa, Homo sapiens
VVSGFTFSSYAMSWVRQAPGKGLEWVSAVSTGGDTTFYADSVKGRFTISRDNSKNTLYLQMNSLRAEDTAVYYCARRHRPDYWGQGTLVTVSS

SEQ ID NO: 26037 - protein, 99 aa, Homo sapiens
AASGFTFDDYAMHWVRQAPGKGLEWVSGISWNSGSIGYADSVKGRFTISRDNAKNSLYLQVNSLRAEDMALYYCAKDISGSGSYYFDYWGQGTLVTVSS

SEQ ID NO: 26038 - protein, 99 aa, Homo sapiens
AASGITFDNYAMHWVRQAPGKGLEWVSGISWNSDSIGYADSVKGRFTISRDNAKNSLYLQMNTLRAEDTALYYCAKDISGSGSYYFDYWGQGTLVTVSS

SEQ ID NO: 26039 - protein, 100 aa, Homo sapiens
VASGFTFSNYPMHWVRQAPGKGLEWVAVLSNDGNDKYFADSVKGRFTISRDNSKNTLYLQMNSLRAEDTAVYYCAKDGAIAAAAYYFDYWGQGTLVTVSS

SEQ ID NO: 26040 - protein, 100 aa, Homo sapiens
AVSGFTFSSYGIHWVRQAPGKGLEWVAVISYKGDDKKYADSVKGRFTISRDNSMNTMYLQMSSLRAEDTAVYYCAKDGAIAAAAYYFDYWGQGTLVTVSS

SEQ ID NO: 26041 - protein, 93 aa, Homo sapiens
AVSGFTLSGYEMNWVRQAPGKGLEWVSFINSGGTIYYAESVKGRFTISRDNAKKSLYLQMNSLRAEDTAIYYCARKDSSGYYWGQGTPVTVSS

SEQ ID NO: 26042 - protein, 94 aa, Homo sapiens
AASGFTFSTYEMNWVRQAPGKGLEWVSYISSGGTTIYYADSVKGRFTMSRDIAENSLYLQMNSLRAEDTAVYYCARKDSSGYYWGQGTLVTVSS

SEQ ID NO: 26043 - protein, 97 aa, Homo sapiens
SVSGGSISSGSYYWGWIRQPPGKGLEWIGSIYYSGSTYYNPSLKSRVTISVDTSKDQFSLRLSSVTAADTAVYYCARRYTSGWYNYWGQGTLVTVSS

SEQ ID NO: 26044 - protein, 97 aa, Homo sapiens
TVSGGSISSYSYYWGWIRQPPGKGLEWIGSLCYSGSTYYNPSLTSRVTMSVDTSKNQFSLKLSSVTAADTAVYYCARRYTSGWYNYWGQGTLVTVSS

SEQ ID NO: 26045 - protein, 98 aa, Homo sapiens
AASGLTFSEAWMSWVRQAPGKGLEWVGRIKSTADGHGGTTDYAAPVKGRFTILRDDSKNTLYLQMNSLKTEDTAVYYCNTDSLVANYWGRGTLVTVSS

SEQ ID NO: 26046 - protein, 96 aa, Homo sapiens
AASGFTFSNAWMSWVRQAPGKGLEWVGRIKSKTDGETTDYATPVKGRFTISRDDSKNTLYLQMNSLRTEDTAVYYCNTDSLVANYWGQGTLVTVSS

SEQ ID NO: 26047 - protein, 99 aa, Homo sapiens
AASGFTFDDYAMHWVRQAPGKGLEWVSGISWNSGSIGYADSVKGRFTISRDNAKNSLYLQMNSLRAEDTALYYCAKARTGSGWYYFDYWGQGTLVTVSS

SEQ ID NO: 26048 - protein, 99 aa, Homo sapiens
AASGFTFDDYGMHWVRQAPGKGLEWVSGISWNSGSIGYADSVKGRFTISRDNAKNSLYLQMDSLRAEDTALYYCAKARTGSGWYYFDYWGQGTLVTVSS

SEQ ID NO: 26049 - protein, 94 aa, Homo sapiens
AASGFNFNIYSMNWARQAPGRGLEWVSYITGGSNAIHYADSVKGRFTVSRDNAKNSLYLQMNSLGDEDTAVYYCARGLQYAMDVWGQGIMVTVS

SEQ ID NO: 26050 - protein, 94 aa, Homo sapiens
AASGFTFNIYSMNWARQAPGKGLEWVSYITGDSKITHYADSVKGRFTISRDNAKNSLYLQMDSLRADDTAVYYCARGLQYAMDVWGQGTTVTVS

SEQ ID NO: 26051 - protein, 105 aa, Homo sapiens
AASGFTFSSYGLHWVRQAPGKGLEWVAVISYDGNNRYYTDSMKGRFTISRDNSKNTLYLQMNSLRAEDTAVYYCARDRYCSGGGCPDYYYGMDVWGQGTTVTVPS

SEQ ID NO: 26052 - protein, 105 aa, Homo sapiens
AASGFTFSVYAMHWVRQAPGKGLEWVALISYDGSNKYYADSVKGRFTISRDNSKNTVYLQMNSLRAEDTAVYYCARDRYCSGGGCPDYYYGMDVWGQGTTVTVSS

SEQ ID NO: 26053 - protein, 95 aa, Homo sapiens
AASGFTFSTCAMSWVRQAPGTGLEWVSVIGGGGVPTYYADSVKGRFTISRDNSKNTVYLQMNSLRVEDTAVYYCAKGSGGSYDYWGPGTLVTVSS

SEQ ID NO: 26054 - protein, 95 aa, Homo sapiens
AASGFTFSSYTMSWVRQAPGQGLEWVSAISGNGVTTHYADSVKGRFTISRDNSKITLYLQMNSLRAEDTAIYYCAKGSGGSYDYWGQGTLVTVSS

SEQ ID NO: 26055 - protein, 96 aa, Homo sapiens
AASGLTFSNYGMHWVRQAPGKGLVWVAVTKSDGDATAIYADSVKGRFTISRDNAKKTVDLQMNSLRAEDTAVYYCVTGGAYFYEYWGQGTPVTVSS

SEQ ID NO: 26056 - protein, 96 aa, Homo sapiens; identical to SEQ ID NO: 26055

SEQ ID NO: 26057 - protein, 94 aa, Homo sapiens
ASGLTFTRYSMHWVRQTPGKGLEWVSRVNEDGIDARYADSVKGRFTISRDNGKNMVFLQMNGLRDEDTAVYYCVTGGAYFYEYWGQGTLVTVSS

SEQ ID NO: 26058 - protein, 94 aa, Homo sapiens; identical to SEQ ID NO: 26057

SEQ ID NO: 26059 - protein, 96 aa, Homo sapiens
ISGDSVSSNSGAWNWIRQSPSRGLEWLGRTYYRSKWHNEYAVSVKSRVTINPDTSKNQFSLQLNSVTPEDTAVYYCARGVTTFDYWGQGTLVTVSS

SEQ ID NO: 26060 - protein, 96 aa, Homo sapiens
IPGDSVSSNSAAWNWIRQSPSRGLEWLGRTYYRSKWYYDYALSVKSRITISPDTSKNQFSLQLKSVTPEDTAIYFCARGVTTFDYWGQGTLVTVSS

SEQ ID NO: 26061 - protein, 98 aa, Homo sapiens
AASGFTFSSYEMNWVRQAPGKGLEWVSYINYDGSIIYYADSVEGRFTTSRDNAKNSLYLQMNSLRAEDTAVYFCARRATVTYYGMDVWGHGTTVTVSS

SEQ ID NO: 26062 - protein, 98 aa, Homo sapiens
AASGFTFSSYEMNWVRQAPGKGLEWISYINYSGSTIYYADSVKGRFTMSRDNAKNSLYLQMNSLRAEDTAVYYCARRATVTYYGMDVWGHGTTVTVSS

SEQ ID NO: 26063 - protein, 99 aa, Homo sapiens
SGFTRFSFSDYEMNWVRQAPGKGLEWISYIDTRGTIVDYADSVKGRFTFSRDNAKNSMYLQMNSLRAEDTAVYYCARRATVTYYGMDVWGQGTTVTVSS

SEQ ID NO: 26064 - protein, 95 aa, Homo sapiens
GFPFSAYEMNWVRQAPGKGLEWVSYIDTSENTKYYADSVKGRFTISRDNAKNSLYLQMNSLRVEDTAVYYCARRATVTYYGMDVWGQGTTVTVSS

SEQ ID NO: 26065 - protein, 98 aa, Homo sapiens
AASGFTLSSYAMSWVRQAPGKGLEWVSAISGSGGSTNHADSVKGRFTISRDKTKNTLYLQMNSLRAEDTAIYYCAKRAYDSSGYIDYWGQGTLVTVSS

SEQ ID NO: 26066 - protein, 98 aa, Homo sapiens
GASGFTFSSYAMSWVRQAPGKGLEWVSAISTSGGSTYHADSVKGRFTISRDNSKNTLYLQMNSLRVEDTAVYYCAKRAYDSSGYIDYWGQGTLVTVSS

SEQ ID NO: 26067 - protein, 97 aa, Homo sapiens
TVSGGSINTYYWSWIRQPPGKRLEWIGYISNSGSTTYNPSLKSRVTISTHTSKNQVSVKLSSVTAADTAVYYCARVFTSGYGVFDYWGQGTLVTVSS

SEQ ID NO: 26068 - protein, 97 aa, Homo sapiens
TVSGGSISSYYWGWIRQPPGEGLEWIGYISNSGSTTYNPSLKSRVTISVDSSKSQLSLMVSSVTTADTALYYCARVFTSGYGVFDYWGQGTLVTVSS

SEQ ID NO: 26069 - protein, 97 aa, Homo sapiens
AASGFILSNYGMSWVRQAPGKGLEWVSHILSSDGATYYTDSVKGRFTISRDIAKNTLFLQMNTLRTEDTALYYCAKRGAAAGPFDYWGQGTLVTVSS

SEQ ID NO: 26070 - protein, 97 aa, Homo sapiens
AASGFTFSNYGMSWVRQAPGKGLEWVSHIRDTGGTAYYADSVKGRFTISRDNSKNTLYLQINSLRAEDTAVYYCAKRGAAAGPFDYWGQGTLVTVSS

SEQ ID NO: 26071 - protein, 97 aa, Homo sapiens; identical to SEQ ID NO: 26070

SEQ ID NO: 26072 - protein, 92 aa, Homo sapiens
AASGFTFSSYNMSWVRRAPGKGLEWVSCITSGSGTIYYADSVKGRFTISRDNAKNSLFLLMNSLRDEDTAVYYCAAGRGGYWGQGTLVTVSS

SEQ ID NO: 26073 - protein, 92 aa, Homo sapiens
AASGFTFSNYYMNWVRQAPGKGLEWVSYISSSSSTTYYADSVKGRFTISRDNAKNSLHLQMNSLRDEDTAVYYCAAGRGGYWGQGTLVTVSS

SEQ ID NO: 26074 - protein, 96 aa, Homo sapiens
AASGFTFNEWWMHWVRQVPGKGLVWVSRIDRDGSRTNYADSVKGRFTVSRDNAKNTLYLQMSSLRVEDTAVYYCAKDFHDAAADYWGPGTLVTVSS

SEQ ID NO: 26075 - protein, 96 aa, Homo sapiens
AASGFAFRSWWMHWVRQGPGKGLVWVSRINREGTVTNLADSVKGRFSVSRDNDKNIIYLQMNSLRAEDTGVYYCAKDFHDAAADYWGQGTLVTVSS

SEQ ID NO: 26076 - protein, 95 aa, Homo sapiens
AASGFTLSSYWMSWVRQAPGKGLEWVANIKEDGSEKNYVDSVKGRFTISRDNAKSSLYLQMNSLRAEDTALYYCTRWTHWYFDLWGRGTLVTVSS

SEQ ID NO: 26077 - protein, 95 aa, Homo sapiens
AASGFTLSTYWMSWVRQAPGEGLEWVANIKEDGSENNLVDSVKGRFTISRDNTKNSLYLQMNSLRAEDTAVYYCTRWTHWYFDLWGRGTLVTVSS

SEQ ID NO: 26078 - protein, 95 aa, Homo sapiens
AASEFTFNKHWMSWVRQAPGKGLEWVANIKEDGSENNLVDSVKGRFTISRDNTKNSLYLQMNSLRAEDTAVYYCTRWTHWYFDLWGRGTLVTVSS

SEQ ID NO: 26079 - protein, 95 aa, Homo sapiens
AASGFTLSTYWMSWVRQAPGKGLEWVANIKEDGSENNLVDSVKGRFTISRDNTKNSLYLQMNSLRAEDTAVYYCTRWTHWYFDLWGRGTLVTVSS

SEQ ID NO: 26080 - protein, 95 aa, Homo sapiens
AASEFIFNKHWMSWVRQAPGKGLEWVANIKEDGSENNLVDSVKGRFTISRDNTKNSLYLQMNSLRAEDTAVYYCTRWTHWYFDLWGRGTLVTVSS

SEQ ID NO: 26081 - protein, 95 aa, Homo sapiens
AASEFTFNTYWMSWVRQAPGKGLEWVANIKEDGSENNLVDSVKGRFTISRDNTKNSLYLQMNSLRAEDTAVYYCTRWTHWYFDLWGRGTLVTVSS

SEQ ID NO: 26082 - protein, 95 aa, Homo sapiens
AASEFTFNTYWMSWVRQAPGKGLEWVANIKEDGSENNLVDSVKGRFTISRDNTKNSLYLQMDSLRAEDTAVYYCTRWTHWYFDLWGRGTLVTVSS

SEQ ID NO: 26083 - protein, 100 aa, Homo sapiens
VGSGFSFSNNGLHWVRQPPGKGLEWVAVIYYDGKSKYYADSVRGRFTISRDNSKNTLYLQMNSLSAEDTAVYYCATVFYGDYARSGMDVWGQGTTVTVSS

SEQ ID NO: 26084 - protein, 100 aa, Homo sapiens
VGSGFTFSHNGMHWVRQAPGKGLEWVAVIYYDGKYKYYADSVKGRFTISRDNSKNTLYLQMNSLRAEDTAVYYCATVFYGDYARSGMDVWGQGTTVTVSS

SEQ ID NO: 26085 - protein, 100 aa, Homo sapiens
VASGFTFSSNGMHWVRQAPGKGLEWVAVIYYDGKSKYYADSVKGRFTISRDNSKNTLYLQMNSLRVEDTAVYYCATVFYGDYARSGMDVWGQGTTVTVSS

SEQ ID NO: 26086 - protein, 99 aa, Homo sapiens
AASGFIFSTYGIHWVRQAPGKGLEWVAVISNDGNNKYYADSVKGRFTISRDNSKNTVYLQMNSLRAEDTAVYYCATVFYGDYARSGMDVWGQGTTVTVS

SEQ ID NO: 26087 - protein, 100 aa, Homo sapiens
VGSGFTFSYNGMHWVRQAPGKGLEWVAVIYYDGKSKYYADSVKGRFTISRDNSKNTLYLQMNSLRVEDTAVYYCATVFYGDYARSGMDVWGQGTTVTVSS

SEQ ID NO: 26088 - protein, 100 aa, Homo sapiens
VASGFTFRSNGMHWVRQAPGKGLEWVAVINYDAKSTYYADSVKGRFTISRDNSKNTLYLQMNSLRVEDTAVYYCATVFYGDYARSGMDVWGQGTTVTVSS

SEQ ID NO: 26089 - protein, 100 aa, Homo sapiens
VGSGFTFSYNGMHWVRQAPGKGLEWVAVIYYDGKSKYYADSVKGRFTISRDNSKNTLYLQMNSLRAEDTAVYYCATVFYGDYARSGMDVWGQGTTVTVSS

SEQ ID NO: 26090 - protein, 100 aa, Homo sapiens; identical to SEQ ID NO: 26089

SEQ ID NO: 26091 - protein, 99 aa, Homo sapiens
TVSGDSISSYYWSWIRQPPGKGLEWIGYVYYTGVTNYNPSLKSRVTISLDTSKNQFSLKVRFVSAADTAIYYCARHRGGSDWQNWFDPWGQGTLVTVSS

SEQ ID NO: 26092 - protein, 99 aa, Homo sapiens
TVSGDSISSYYWSWIRQPPGKGLEWIAYVYHTGTTNYNPSLQSRVTISIDTSKKQFSLKLNSVTASDTAVYYCARHRGGSDWQNWFDPWGQGTLVTVSS

SEQ ID NO: 26093 - protein, 96 aa, Homo sapiens
ASGFTFSDFWMTWVRQAPGKGLEYMANIKKDGSEKYYVDSVKGRFTISRDNAKHSLYLQMTSLSTEDTAVYYCARYTSSWSTFDYWGQGTLVTVSS

SEQ ID NO: 26094 - protein, 96 aa, Homo sapiens
AVSGFQFSDYWMSWVRQAPGKGLEWVASINKDGSAEYYVDSVKGRFTISRDNAQISMYLQMNSLRAEDTAMYYCARYTSSWSTFDYWGQGALVTVS

SEQ ID NO: 26095 - protein, 119 aa, Homo sapiens
TETLTLTCTVSGFSLTNGKMGVSWIRQPPGKALEWLAHIFSNEEKAYSTSLKSRLTISKDTSKSQVVLTMTSMDPVDTATYYCARIPLGSCSSTICYHPTYYYSGMDVWGQGTTVTVSS

SEQ ID NO: 26096 - protein, 119 aa, Homo sapiens
TETLTLTCTVSGFSLTNGKMGVSWIRQPPGKALEWLAHIFSNDEKAYSTSLKSRLTISKDTSKSQVVLTMTSMDPVDTATYYCARIPLGSCSSTICYHPTYYYSGMDVWGQGTTVTVSS

SEQ ID NO: 26097 - protein, 99 aa, Homo sapiens
VSGFTVGTYGMHWVRQAPGKGLEWVAMISHNGRTTQYSDSVKGRFTISRDTSKDTLYLQMNSLKTEDTALYYCARDLYGSGWYNYFDPWGLGTLVTVSS

SEQ ID NO: 26098 - protein, 100 aa, Homo sapiens
EASGFTFNIYGMHWVRQAPGKGLEWVAMMPYDGSSKVYTDSVKGRFTISRDNSKNTLYLQMDSLRAEDTAVYYCARDLYGSGWYNYFDPWGQGTLVTVSS

SEQ ID NO: 26099 - protein, 91 aa, Homo sapiens
AASGFTFSTYEMNWVRQAPGKGPEWVSYISNSGNTIYYADSVKGRFTISRDNAKNSLYLQMNSLRAEDTALYYCARSVDFWGQGTLVTVSS

SEQ ID NO: 26100 - protein, 90 aa, Homo sapiens
ASGFTFSTYEMNWVRQAPGKGPEWISYISSSDSTIYYADSVKGRFTISRDNAKNSLYLQMNSLRAEDTAVYYCARSVDFWGQGTLVTVSS

SEQ ID NO: 26101 - protein, 90 aa, Homo sapiens
ASGFTFNTYEMNWVRQAPGKGLEWVSYISSSDSTIYYTDSVKGRFTISRDNAKNSLYLQMNSLGVEDTAVYFCARSVDFWGQGTLVTVSS

SEQ ID NO: 26102 - protein, 90 aa, Homo sapiens
ASGFTFNTYEMNWVRQAPGKGLEWISYISSSDSTIYYADSVKGRFTISRDNAKNSLYLQMNSLRAEDTAVYYCARSVDFWGQGTLVTVSS

SEQ ID NO: 26103 - protein, 90 aa, Homo sapiens
ASGFTFSTYEMNWVRQAPGKGLEWISYISSSDSTIYYADSVKGRFTISRDNAKNSLYLQMNSLRAEDTAVYYCARSVDFWGQGTLVTVSS

SEQ ID NO: 26104 - protein, 96 aa, Homo sapiens
AASGFTFSTYVMNWVRQAPGKGLEWVSGISGSGDTTYYADSVKGRFTVSRDNSMKILYLQMNSLRVEDTAVYYCAKGAGSDSGRYWGQGTLVTVSS

SEQ ID NO: 26105 - protein, 95 aa, Homo sapiens
GSGFIFSDYAINWVRQAPGKGPEWVSAISGSGATTYYADSVQGRFSISRDNSKNTVSLQMNSLRVEDTALYYCAKGAGSDSGRYWGQGTLVTVSS

SEQ ID NO: 26106 - protein, 96 aa, Homo sapiens
GASGFTFSSHAMNWVRQAPGKGLEWVSGISGSGGSTYYADSVKGRFTISRDNSENTLDLQMNSLRADDTAVYYCAKGAGSDSGRYWGQGTLVTVSS

SEQ ID NO: 26107 - protein, 96 aa, Homo sapiens; identical to SEQ ID NO: 26106

SEQ ID NO: 26108 - protein, 96 aa, Homo sapiens
AASGFTFSSYAMNWVRQAPGKGLEWVSGILGTGVTTYYADSVKGRFTISRDNSKNTLYLQMNSLRGDDTAVYYCAKGAGSDSGRYWGQGTLVTVSS

SEQ ID NO: 26109 - protein, 96 aa, Homo sapiens
AASGFTFSSYWMSWVRQAPGKGLEWVANIKQDRSEKYYVDSVKGRFTISRDNAKNSLFLQMNSLRAEDTAVYYCVRGGYYGSFDYWGQGTLVTVSS

SEQ ID NO: 26110 - protein, 96 aa, Homo sapiens
AASGFSFRDYWMSWVRQTPGKGLEWVANIKQDGSEKSCVDFVKGRFTISRDNAKNSVYLQVDSLRVEDTAVYYCVRGGYYGSFDYWGQGTLVTVSS

SEQ ID NO: 26111 - protein, 95 aa, Homo sapiens
AASGFTFSSYSINWVRQAPGKGLEWLSYISSSSSSIYYADSVKGRFTISRDNAKNSLSLQMNTLRDEDTAVYYCVKSRNYYFDYWGQGTLVTVSS

SEQ ID NO: 26112 - protein, 94 aa, Homo sapiens
ASGFTFSSYSVNWVRQAPGKGLEWVSYISSSSSSIYYADSVKGRFTISRDNARDSLYLQMNSLGDEDTAVYYCVKSRNYYFDYWGQGTLVTVSS

SEQ ID NO: 26113 - protein, 99 aa, Homo sapiens
AASGFTFSSYWMHWVRQAPGKGLVWVSRISIDGSTTTYAGSVKGRFTISRDNAKNTLYLQMNSLRAEDTAVYYCARPATVTTPNWFEPWGQGTLVTVSS

SEQ ID NO: 26114 - protein, 99 aa, Homo sapiens
AASGFTVSSNYMSWVRQAPGKGLEWVSRISIDGSTTTYAGSVKGRFTISRDNAKNTLYLQMNSLRAEDTAVYYCARPATVTTPNWFEPWGQGTLVTVSS

SEQ ID NO: 26115 - protein, 98 aa, Homo sapiens
SGFTFSTYAMNWVRQVPGKGLEWVSAITGTEDSTYYADSVQGRFTISRDNSKNTLYLQMNSLRAEDTAVYYCAKYCSGGGCYSGLDFWGQGILVTVSS

SEQ ID NO: 26116 - protein, 100 aa, Homo sapiens
VGSGFTFSNYAMNWVRQAPGKGLEWVSAIPRSDGATYYADSVKGRFTISRDNSKNTLFLQMNSLRADDTAVYYCAKYCSGGGCYSGLDFWGQGTLVTVSS

SEQ ID NO: 26117 - protein, 100 aa, Homo sapiens; identical to SEQ ID NO: 26116

SEQ ID NO: 26118 - protein, 100 aa, Homo sapiens
EGSGFSFSNYAMNWVRQAPGKGLEWVAAILRSDSATYYADSVKGRFTISRDNSKSTLFLQMHSLRAEDTAIYYCAKYCSGGGCYSGLDFWGQGTLVTVSS

SEQ ID NO: 26119 - protein, 92 aa, Homo sapiens
TVSGGSISSSSYYWGWIRQPPGKGLEWIGIIYYSGSTYYNPSLKSRVTISVDASKNQFSLKLSSVTAADTAVYYCARRGDHWGQGILVTVSS

SEQ ID NO: 26120 - protein, 92 aa, Homo sapiens
TVSGGSISSSYYYWGWIRQPPGKGLEWIGSIYYSGSTYYNPSLKSRVTISIDTSKNQFSLKLSSVTAADTAVYYCARRGDHWGQGTLVTVSS

SEQ ID NO: 26121 - protein, 92 aa, Homo sapiens
TVSGDSIRSSSYYWGWIRQPPGKGLEWIGIIYSSGSTYYNPSLKSRLTISVDTSKNQFSLQLSSVTAADTAVYYCARRGDHWGQGTLVTVSS

SEQ ID NO: 26122 - protein, 99 aa, Homo sapiens
AASGFTFSSHWMSWVRQAPGKGLEWVSNIKQDGSEKYYVDSVKGRFTISRDNAKNSLYLQMNSLRAEDAAVYYCAREPNIAVVTHFDYWGQGALVTVSS

SEQ ID NO: 26123 - protein, 99 aa, Homo sapiens
AASGFTFSNYWMSWVRQAPGKGLEWVANIKQDGSETYYVDSVKGRFTISRDNAKNSLFLQMNNLRAEDTAVYFCAREPNIAVVTHFDYWGQGNLVTVSS

SEQ ID NO: 26124 - protein, 99 aa, Homo sapiens
AASGFTFSSYWMSWVRQTPGKGLEWVANIKQDGSEKYYVESVKGRFTISRDNAKNSLYLQMDSLGAADTAVYYCAREPNIAVVTHFDYWGQGTLVTVSS

SEQ ID NO: 26125 - protein, 96 aa, Homo sapiens
AASGFSFFSYAMSWVRQAPGKGLKWVSTINTSGGVTYYADSVKGRFTISRDNSKNTLSLQMNSLRAEDTAIYYCAKLITGWQFDSWGQGTLVTVSS

SEQ ID NO: 26126 - protein, 96 aa, Homo sapiens
AASGFTFSSFAVTWVRQAPGKGLEWVSTIGGSSTSTYYADSVKGRFSISRDNSKNTVYLQMSSLRAEDTAIYYCAKLITGWQFDSWGQGTLVTVSS

SEQ ID NO: 26127 - protein, 96 aa, Homo sapiens
ISGDSVSSTSAAWIWIRQSPSRGLEWLGRTYYRSKWLNDYAVAVKSRITVIPDTSKNQFSLQLNSVTPEDTAVYYCARGNYWFDSWGQGTLVTVSS

SEQ ID NO: 26128 - protein, 96 aa, Homo sapiens
ISGDSVSSNSAVWYWFRQSPSRGLEWLGRTYYRSKWYNDYAVSVKSRITVNPDTSKNQFSLQLNSVTPEDTAVYYCARGNYWFDSWGQGTLVTVSS

SEQ ID NO: 26129 - protein, 96 aa, Homo sapiens
AASGFSFNGAWMSWVRQAPGKGLEWVGRIKSKAEGGTTDYAAPVKGRFTISRDDSKNTLYLQMNSLKTEDTAVYYCSWFGELWYYWGQGTLVTVSS

SEQ ID NO: 26130 - protein, 96 aa, Homo sapiens
AASGFTFSDAWMSWVRQAPGKGLEWVGRIKSKADGEAVDYAAPVKGRFTISRDDSKDTLYLQMNSLKTEDTALYYCSWFGELWYYWGQGTLVTVSS

SEQ ID NO: 26131 - protein, 96 aa, Homo sapiens
AASGFTFTNAWMSWVRQAPGKGLEWVGRIKAKTDDGTTDYAAPVKGRFTISRDDSKNTLYLQMNSLKTEDTAVYYCSWFGELWYYWGQGTLVTVSS

SEQ ID NO: 26132 - protein, 96 aa, Homo sapiens
AASGFTFNDAWMSWVRQAPGKGLEWVGRIKSNTDGGTIDYAAPVKGRFTISRDDSKNTLFLQMNSLKTEDTAVYYCSWFGELWYYWGQGTLVTVSS

SEQ ID NO: 26133 - protein, 96 aa, Homo sapiens
AASGFTFTNAWMSWVRQAPGKGLEWVGRIKAKTDDGTTDYAAPVKGRFTMSRDDSKNTLYLQMKSLKTEDTAVYYCSWFGELWYYWGQGTLVTVSS

SEQ ID NO: 26134 - protein, 96 aa, Homo sapiens
AASGFTFSDAWMSWVRQAPGKGLEWVGRIKSKTAGGTTDYAAPVKGRVTISRDDSKNMLYLQLNSLKTEDTAVYYCSWFGELWYYWGQGTLVTVSS

SEQ ID NO: 26135 - protein, 100 aa, Homo sapiens
TVSGGSISSSSYYWGWIRQPPGKGLEWIGSGSMYYSGRINYNPSLKSRVTISVDTSKNQFSLKLSSVTAADTAVYFCVRRGDSYGIFDYWGQGTLVTVSS

SEQ ID NO: 26136 - protein, 97 aa, Homo sapiens
TVSGDSISRNYYWGWIRQPPGKGLEWIGSISYSGRTYYNPSLKSRVTISVDTSRNQLSLKLTSVTAADTAVYYCVRRGDSYGIFDYWGQGALVTVSS

SEQ ID NO: 26137 - protein, 97 aa, Homo sapiens; identical to SEQ ID NO: 26136

SEQ ID NO: 26138 - protein, 95 aa, Homo sapiens
AASGFTFSTYSMNWVRQAPGKGLEWFSYIRNSPPTIYYADSVKGRFTISRDNAKNSLYLQMNSLAVDDTAVYYCARDHFYAFDLWGQGTMVTVSS

SEQ ID NO: 26139 - protein, 95 aa, Homo sapiens
AASGFTFSTYSMNWVRQAPGKGLEWLSYIRNSPPTIYYADSVKGRFTISRDNAKNSLYLQMNSLAVDDTAVYYCARDHFYAFDLWGQGTMVTVSS

SEQ ID NO: 26140 - protein, 95 aa, Homo sapiens
ASGYTFTGKYMHWVRQAPGQGLEWMGWINPNSGGTNYAQNFQGWVTMTRDTSTSTAYMELSRLRYDDTAVYFCAREVTSSWFDYWGQGTQVTVSS

SEQ ID NO: 26141 - protein, 94 aa, Homo sapiens
SGYTFTGSYMHWVRQAPGQGLEWMGWINCNSGGTKYAQKFQGRVTMTRDTSISTVYMELNRLIFDDTAVYFCAREVTSSWFDYWGQGTLVTVSS

SEQ ID NO: 26142 - protein, 94 aa, Homo sapiens
AVYGGSFSGYYWSWIRQPPGKGLEWIGEINHSGTTRYNPSLKSRVTISVDTSKNHFSLKLSSVTAADTAIYYCARKDYDGLDYWGQGTLVTVSS

SEQ ID NO: 26143 - protein, 94 aa, Homo sapiens
AVYGGSFSGYYWSWIRQPPGKGLEWIGEINHSGSTNYNPSLKSRVTISVDTSKNQFSLKLSSVTAADTAVYYCARKDYDGLDYWGQGTLVTVSS

SEQ ID NO: 26144 - protein, 91 aa, Homo sapiens
EVSGFTVNSHWMHWVRQVPGKGLVWVSHINPDGTNIDYVDSVKGRFIISRDNSKNTLYLQMNSLRAEDTAVYYCARGYDLWGQGTLVTVSS

SEQ ID NO: 26145 - protein, 91 aa, Homo sapiens
AASGFSFSSSWMHWVRQAPGRGLMWVSQINGDSSNTRYADSVKGRFTISRDNAKNTLYLQMNSLRAEDTAVYFCARGYDLWGQGTLVTVSS

SEQ ID NO: 26146 - protein, 91 aa, Homo sapiens
AASAFTFSSHWMHWVRQAPGKGLVWVSGINSDGSKTVYADSVKGRFAISRDNAKNTLYLQMNSLRAEDTAVYYCARGYDLWGQGTLVTVSS

SEQ ID NO: 26147 - protein, 95 aa, Homo sapiens
VASGFRFSSYWMSWVRQAPGKGLEWVANIKQDGSEKYYVDSVKGRFTISRDNAKNSLYLQMNSLRVEDTAMYYCARYGGPDLDYWGQGTLVTASS

SEQ ID NO: 26148 - protein, 95 aa, Homo sapiens
AASEFTFSNSWMSWVRQAPGKGLEWVANIKKDGSEKYYADSVKGRFTISRDNAKNSLYLQMNNLRAEDTAVYYCARYGGPDLDYWGQGTLVTVSS

SEQ ID NO: 26149 - protein, 95 aa, Homo sapiens
AASGLTFSDYYMTWIRQAPGKGPEWVSYISSSGRDKYYADSVKGRFTISRDNAKNSLYLQMNSLRAEDTAVYYCARAIYDAFDIWGQGTKVTVSS

SEQ ID NO: 26150 - protein, 94 aa, Homo sapiens
AASRFTFSNYYMTWIRQAPGKGLEWISYISNSGSSTYYADSVKGRFTISRDNAKNSLYLQMNGLRAEDTAVYYCARAIYDAFDIWGQGKMVTVS

SEQ ID NO: 26151 - protein, 94 aa, Homo sapiens
AASRFTFSNYYMTWIRQAPGKGLEWVSYISNSGSSTYYADSVKGRFTISRDNAKNSLYLQMNGLRAEDTAVYYCARAIYDAFDIWGQGKMVTVS

SEQ ID NO: 26152 - protein, 94 aa, Homo sapiens
AASGFTFSNYYMTWIRQAPGKGLEWISYISNSGSSTYYADSVKGRFTISRDNAKNSLYLQMNGLRAEDTAVYYCARAIYDAFDIWGQGKMVTVS

SEQ ID NO: 26153 - protein, 94 aa, Homo sapiens
AASRFTFSDYYMTWIRQAPGKGLEWISYISNSGSSTYYADSVKGRFTISRDNAKNSLYLQMNGLRAEDTAVYYCARAIYDAFDIWGQGKMVTVS

SEQ ID NO: 26154 - protein, 97 aa, Homo sapiens
AASGFTFSNYWMTWVRQAPGKGLEWVANIKQDASEKYYVDSVKGRFTISKDNAKNSLYLQMNSLRADDTAVYYCARGYGDYHPLDYWGQGTLVTVSS

SEQ ID NO: 26155 - protein, 97 aa, Homo sapiens; identical to SEQ ID NO: 26154

SEQ ID NO: 26156 - protein, 97 aa, Homo sapiens
AASGFTFSSYWLTWVRQAPGKGLEWVANIKQGGSERYYLDSVKGRFTISRDDAKNSVYLQMNSLRAEDTAVYYCARGYGDYHPLDYWGQGTLVTVSS

SEQ ID NO: 26157 - protein, 97 aa, Homo sapiens
AASGFTFSSYWMTWVRQAPGKGLEWVANIKQGGSERYYLDSVKGRFTISRDDAKNSVYLQMNSLRAEDTAVYYCARGYGDYHPLDYWGQGTLVTVSS

SEQ ID NO: 26158 - protein, 97 aa, Homo sapiens
AASGFTFSSYWMTWVRQAPGKGLGWVANIKQDGSEKYYVDSVRGRFTISRDDAKNSVYLQMNSLRVEDTAVYYCARGYGDYHPLDYWGQGTLVTVSS

SEQ ID NO: 26159 - protein, 88 aa, Homo sapiens
DHAMHWVRQIPGKGLEWVSGIFWDNDRPGYADSVKGRFSISRDNAKNSLYLQMNSLTTDDTATYYCGKDISAGGLDVWGQGTTVIVSS

SEQ ID NO: 26160 - protein, 88 aa, Homo sapiens
DHAMHWVRQIPGKGLEWVSGIFWDNDRPGYADSVKGRFSISRDNAKNSLYLQMNSLTTDDTATYYCGKDISAGGLDVWGQGTTVTVSS

SEQ ID NO: 26161 - protein, 95 aa, Homo sapiens
ASGFNLHDHAMHWVRQAPGKGLEWISGIYWNGDGVDYADSVKGRFTTSRDNAKNSLYLQMNSLRADDTALYFCGKDISAGGLDVWGQGTTVTVSS

SEQ ID NO: 26162 - protein, 96 aa, Homo sapiens
VGSGVIVRDHAMHWVRQAPGKGLEWVSGIFWNNDGPGYADSVKGRFTVSRDNAKNSLYLQMNSLRAEDTAIYYCGKDISAGGLDVWGPGTTVIVSS

SEQ ID NO: 26163 - protein, 96 aa, Homo sapiens
VGSGSTLNDHAMHWVRQAPGKGLEWVSGIMWKSDRIDYADSVKGRFTTSRDNAKNSLYLEMNSLRPEDSALYYCGKDISAGGLDVWGQGTTVTVSS

SEQ ID NO: 26164 - protein, 96 aa, Homo sapiens
VGSGSTLNDHAMHWVRQAPGKGLEWVSGIMWKSDRIDYADSVKGRFTTPRDNAKNSLYLEMNSLRPEDSALYYCGKDISAGGLDVWGQGTTVTVSS

SEQ ID NO: 26165 - protein, 94 aa, Homo sapiens
AASGFTFNKAWMSWVRQAPGKGLEWVARLKSKSDGGTIDYAAPVKGRFTISRDDSKNTLYLQMSSLKTDDTAVYYCMRDYGEPWGQGTLVTVSS

SEQ ID NO: 26166 - protein, 94 aa, Homo sapiens; identical to SEQ ID NO: 26165

SEQ ID NO: 26167 - protein, 94 aa, Homo sapiens
AAFGFTVSKAWMSWVRQAPGKGLEWVGRIKSRTDGGTTDYAAPVKGRFRISRDDSQNKVFLEMNSLEIEDTAIYFCMRDYGEPWGQGTLVTVSS

SEQ ID NO: 26168 - protein, 94 aa, Homo sapiens
AASGFTFSKAWMSWVRQPPGRGLEWVGRIKSKTDGGTRHYAAPVKGRFTILRDDLQNTLYLHMNSLKTDDTGMYFCMRDYGEPWGQGTLVTVSS

SEQ ID NO: 26169 - protein, 92 aa, Homo sapiens
ASGFSIRDYEMNWVRQAPGKGLEWVSLIRSSGTSVFYADSVKGRFTSSRDNAKNTLYLQMNSLRVEDTATYYCVRIYGSGTWGQGTLVTVSS

SEQ ID NO: 26170 - protein, 92 aa, Homo sapiens; identical to SEQ ID NO: 26169

SEQ ID NO: 26171 - protein, 93 aa, Homo sapiens
VASGFSFSRYEMHWVRQVPGRGLEWVAHISDSGRRIHYAASVKGRFTISRDNARNSMFLQMTSLRADDSGLYYCVRIYGSGTWGQGTRVTVAS

SEQ ID NO: 26172 - protein, 98 aa, Homo sapiens
TVSRDSISTGGYYWSWIRQPPGKGLEWLGYIYYTGSTSYNPSLKSRLTMSLDTSGSQFSLRLTSLTAADTAVYYCARGSGYSYSYNYWGQGTLVIVSS

SEQ ID NO: 26173 - protein, 98 aa, Homo sapiens; identical to SEQ ID NO: 26172

SEQ ID NO: 26174 - protein, 98 aa, Homo sapiens
TVSGGSINTGGYYWTWIRQQPGKGLEWIGYIYYTGSTSYDPSLKSRLSMSIDTSKSQFSLHLNSVTAADTAVYFCARGSGYSYSYNYWGQGTLVTVSS

SEQ ID NO: 26175 - protein, 102 aa, Homo sapiens
IVSGASISSGSYYWSWIRQPAGKGLEWIGRVYTSGTTNHYNPSLKSRVTISLDTSRNQFSLKLRSVTAADTAVYYCARDRRYSSSWYAFDIWGQGTMVTVSS

SEQ ID NO: 26176 - protein, 101 aa, Homo sapiens
TVSGASISSGSYYWNWIRQPAGKGLEWIGRIYISGSTNYNPSLKSRVIISVDTSKSQFSLKLRSVTAADTAVYYCARDRRYSSSWYAFDIWGQGTMVTVSS

SEQ ID NO: 26177 - protein, 101 aa, Homo sapiens; identical to SEQ ID NO: 26176

SEQ ID NO: 26178 - protein, 92 aa, Homo sapiens
AASGFTFSSSAMSWVRQAPGKGLEWVSIIYSGGGVTFYADSVKGRFTISRDNSKNTLYLQMNSLRAEDTAIYYCANRAFDYWGQGTLVTVSS

SEQ ID NO: 26179 - protein, 92 aa, Homo sapiens; identical to SEQ ID NO: 26178

SEQ ID NO: 26180 - protein, 92 aa, Homo sapiens
AASGFIFSSCDMSWVRQAPGKGLEWVSLIYTGGSSAFYAGSVKGRFTISRDNSKNTLYLQMNSLRAEDTAVYYCANRAFDYWGQGILVTVSS

SEQ ID NO: 26181 - protein, 92 aa, Homo sapiens
NVSGGSISRYYWSWIRQPPGKGLEWIGYIYDRGSTNYNPSLKSRVTISVDTSKSQFSLRLTSVTAADTAVYYCARGRSFDQWGQGILVTVSS

SEQ ID NO: 26182 - protein, 92 aa, Homo sapiens
TVSGGSISSYYWSWIRQPPGKGLEWIGYIYDSGSTNYNPSLKSRVTISVDTSKRQFSLRLRSVTAADTAVYHCARGRSFDQWGQGTLVTVSS

SEQ ID NO: 26183 - protein, 92 aa, Homo sapiens
TVSGGSISSYFWSWIRQPPGKGLEWIGYIYGSGSTNYNPSLKSRVTISVDTSKSQFSLRLSSVTAADTAVYHCARGRSFDQWGQGTLVTVSS

SEQ ID NO: 26184 - protein, 92 aa, Homo sapiens
TVSGGSISSYYWSWIRQPPGKGLEWIGYIYGSGSTNYNPSLKSRVTISVDTSKSQFSLRLSSVTAADTAVYHCARGRSFDQWGQGTLVTVSS

SEQ ID NO: 26185 - protein, 92 aa, Homo sapiens
TVSGGSISSYYWSWIRQPPGKGLEWIGYIYDSGSTNYNPSLKSRVTISVDTSKSQFSLRLSSVTAADTAVYHCARGRSFDQWGQGTLVTVSS

SEQ ID NO: 26186 - protein, 92 aa, Homo sapiens
TVSGGSISRYYWSWIRQPPGKGLEWIGYIYVPGSTNYNPSLKSRVTISVDSSKSQFSLRLSSVTAADTAVYYCARGRSFDQWGQGILVTVSS

SEQ ID NO: 26187 - protein, 92 aa, Homo sapiens
SVSGGSISRYYWSWIRQPPGKGLEWIGYIYDRGSTNYNPSLKSRVTISVDTSKSQFSLRLSSVTAADTAVYYCARGRSFDQWGQGILVTVSS

SEQ ID NO: 26188 - protein, 92 aa, Homo sapiens
TVSGGSISNSFWSWIRQPPGKGLEWIGYIYYSGSTNYKPSLKSRVTISVDTSKNQVSLKLTSVTAADTAVYYCARGRSFDQWGQGTLVTVSS

SEQ ID NO: 26189 - protein, 99 aa, Homo sapiens
KGSGYSFTSYWIGWVRQMPGKGLEWMGIIYPGDSDTRYSPSFQGQVTISADKSISTAYLQWSSLQASDTAMYYCARRGNSSGWYGGDYWGQGTLVTVSS

SEQ ID NO: 26190 - protein, 99 aa, Homo sapiens
KGSGYSFTSYWIGWVRQMPGKGLEWMGIIYPGDSDTRYSPPFQGQVTISADKSISTAYLQWSSLQVSDTAMYYCARRGNSSGWYGGDYWGQGTLVTVSS

SEQ ID NO: 26191 - protein, 99 aa, Homo sapiens; identical to SEQ ID NO: 26189

SEQ ID NO: 26192 - protein, 99 aa, Homo sapiens
KGSGYSFTNYWIGWVRQMPGKGLEWMGIIYPGDSDTRYSPSFQGQVTISADKSISTAYLQWSSLKASDTAMYYCARRGNSSGWYGGDYWGQGTLVTVSS

SEQ ID NO: 26193 - protein, 94 aa, Homo sapiens
AASGFSFRTYWMSWIRQAPGKGPEWVGYINQDSSETYYVDSMKGRFTISRDNARNSLYLQMNSLRTEDTAVYYCARHGGAPDYWGQGTLVTVSS

SEQ ID NO: 26194 - protein, 94 aa, Homo sapiens
AASGFTFSNYWMTWVRQAPGKGLEWVANIKEDGSQKNHVDSVKGRFTISRDNAKSSLYLQMNSLRAEDTAVYYCARHGGAPDYWGQGTLVTVSS

SEQ ID NO: 26195 - protein, 96 aa, Homo sapiens
ATSGFTLNNAWMSWVRQAPGKGLEWIGRIKSRTDGGTTDYAAPVKGRFTISRDDSKNTLYLQMNNLKTEDTAVYYCTKGGTTLGYWGQGTLVTVSS

SEQ ID NO: 26196 - protein, 96 aa, Homo sapiens
AVSGFSVTNAWMSWVRQAPGKGLEWVGRIKSKTDGGTTDYAAHVKDRFTISRDDSKNTLYLRMTSLKSEDTAVYYCTKGGTTLGYWGQGSLVTVSS

SEQ ID NO: 26197 - protein, 94 aa, Homo sapiens
AASGFTFTSYAMSWVRQAPGKGLEWVSIIYSGDDTRYYVESVKGRFTISRDNSKNTLYLQMNSLRADDTAVYYCAKGSGAMDVWGHGTTVTVSS

SEQ ID NO: 26198 - protein, 94 aa, Homo sapiens; identical to SEQ ID NO: 26197

SEQ ID NO: 26199 - protein, 94 aa, Homo sapiens
AASGFTFTSYAMSWVRQAPGKGLEWVSIIYSGDDTRYYVESVKGRFTISRDNSRNTLYLQMNSLRADDTAVYYCAKGSGAMDVWGHGTTVTVSS

SEQ ID NO: 26200 - protein, 94 aa, Homo sapiens
AASGFIFNNYAMSWVRQAPGKGLEWVSTISGNGRTTYYADSVKGRFTVSRDNSKNTLYLQMNSLRAEDTALYYCAKGSGAMDVWGQGTTVTVSS

SEQ ID NO: 26201 - protein, 100 aa, Homo sapiens
ASGYTFTSYDINWVRQAPGQGLEWMGWMNANTGNTGYAQKFQGRVTMTRYTSISTAYMELSSLGSEDTAFYYCARAGYCSSTSCGGFDYWGQGTLVIVSS

SEQ ID NO: 26202 - protein, 99 aa, Homo sapiens
SGYIFTSYDINWVRRAPGQGFEWMGWMNSNTGNTGYAQKFQGRVALTRNTLTSTAYMELSSLRSEDTAVYYCARAGYCSSTSCGGFDYWGQGILVTVSS

SEQ ID NO: 26203 - protein, 96 aa, Homo sapiens
AASGFTFSSYGMNWVRQAPGKGLEWVTVISDDGYNKYYADSVKGRFTISRDNSKNMLYLQMNSLRAEDTAVYYCAKEYSSGLTDYWGQGTLVTVSS

SEQ ID NO: 26204 - protein, 96 aa, Homo sapiens; identical to SEQ ID NO: 26203

SEQ ID NO: 26205 - protein, 96 aa, Homo sapiens
AASGFTFRSYGMNWVRQAPGKGLEWVAVISSGGGSKYYADSVKGRFTISRDNSENTLYLQMNTLRAEDTAVYYCAKEYSSGLTDYWGQGTLVTVSS

SEQ ID NO: 26206 - protein, 93 aa, Homo sapiens
SGFTFSDYWMSWVRQAPGKGLEWVAIIHKDGSSDNYVDSVKGRFTISRDNSKNSLYLQMNSLRDEDTALYYCARDANSLFDYWGQGTLVTVSS

SEQ ID NO: 26207 - protein, 93 aa, Homo sapiens; identical to SEQ ID NO: 26206

SEQ ID NO: 26208 - protein, 94 aa, Homo sapiens
AASGFTFSSNWMSWVRQAPGKGMEWVANIKHDGSTKYYVGSVRGRFTISRDNAKNSLFLEMNNLRAEDTAVYYCARDANSLFDYWAREPWSPSP

SEQ ID NO: 26209 - protein, 99 aa, Homo sapiens
ISGDSVSGNRAAAWNWIRQSPSRGLEWLGRTYYKSKWYNDYAVSVKGRINIRPDTSRNQFSLQLNSVTPDDTAVYYCARQPGSWYFDVWGRGTLVTVSS

SEQ ID NO: 26210 - protein, 99 aa, Homo sapiens
ISGDSVSGNRAAAWNWIRQSPSRGLEWLGRTYYKSKWYNDYAVSVKGRINISPDTSRNQFSLQLNSVTPDDTAVYYCARQPGSWYFDVWGRGTLVTVSS

SEQ ID NO: 26211 - protein, 98 aa, Homo sapiens
ISGDSVCSKNAAWSWIRQSPSRGLEWLGRTNCRSEWYNDYAVSVKSRITIKPDTSKNQLSLELNSVTPEDSAVYFCARQPGSWYFDVWGRGTLVTVSS

SEQ ID NO: 26212 - protein, 100 aa, Homo sapiens
AASGFTFNSYWMAWVRQAPGRGLEWVANIKQDGSETYYVDSVQGRFTISRDNAKNSLSLQMNSLRAEDTALYYCARIYDYGGRHYGMDVWGQGTTVTVSS

SEQ ID NO: 26213 - protein, 100 aa, Homo sapiens
AASGFTFNTYWMAWVRQAPGRGLEWVANIKQDGSETYYVDSVQGRFTISRDNAKNSLSLQMNSLRAEDTALYYCARIYDYGGRHYGMDVWGQGTTVTVSS

SEQ ID NO: 26214 - protein, 100 aa, Homo sapiens; identical to SEQ ID NO: 26212

SEQ ID NO: 26215 - protein, 100 aa, Homo sapiens
AASGFTFSSHWMSWVRQAPGKGLEWVANINQDGNEKYYVDSVKGRFTIFRDNAKNSLYLQMYSLRAEDTALYYCARIYDYGGRHYGMDVWGQGTTVTVSS

SEQ ID NO: 26216 - protein, 93 aa, Homo sapiens
ISGDSVSSSSATWNWFRQSPSRGLEWLGRTYYRSKWYFDYAESLKSRVTINPDTSKNQFSLQLNSVTPEDTAVYYCARGLAYWGQGTLVTVSS

SEQ ID NO: 26217 - protein, 93 aa, Homo sapiens
ISGDNVSNNSAIWTWIRQSPSRGLEFLGRTYYRSRWSNDYAPSVKSRMTIKPDTSRNQLSLQLNSVTPEDTAVYYCARGLAYWGQGTLVTVSS

SEQ ID NO: 26218 - protein, 93 aa, Homo sapiens; identical to SEQ ID NO: 26217

SEQ ID NO: 26219 - protein, 91 aa, Homo sapiens
SGYIFTNYAMHWVRQAPGQRLEWMGWIYAGNGNTKYSQKFQGRVTITRDTSASTAYMELSSLRSEDTTVYYCARSMSFDYWGQGTLVTVSS

SEQ ID NO: 26220 - protein, 92 aa, Homo sapiens
ASGYTLTTFGMHWVRQAPGQRLEWMGSINTGDGKTKYSQKFQGRVTITRDTSASTVYLEVNSLRSEDTAIYYCARSMSFDYWGQGTLVTVSS

SEQ ID NO: 26221 - protein, 92 aa, Homo sapiens
ASGFRLTDNDIHWVRQAPGQRFEWMGWISAAHANTKYSQKFQDRITITLDTSAATAYMELSSLTSEDTAIYYCARSRSCDYWGQGTLVTVSS

SEQ ID NO: 26222 - protein, 92 aa, Homo sapiens
ASGFRLTDNDIHWVRQAPGQRFEWMGWISAAHGNTKYSQKFQDRITITLDTSAATAYMELSSLTSEDTAIYYCARSRSCDYWGQGTLVTVSS

SEQ ID NO: 26223 - protein, 92 aa, Homo sapiens; identical to SEQ ID NO: 26222

SEQ ID NO: 26224 - protein, 92 aa, Homo sapiens
ASGFRLTDNDIHWVRQAPGQRFEWMGWISAAHGNTKSSQKFQDRITITLDTSAATAYMELSSLTSEDTAIYYCARSRSCDYWGQGTLVTVSS

SEQ ID NO: 26225 - protein, 92 aa, Homo sapiens
ASGFRLTDNDIHWVRQAPGQRFEWMGWISAAHGNSKYAQKFQDRITITLDTSTATAYMELSSLTSEDTAIYYCARSRSCDYWGQGTLVTVSS

SEQ ID NO: 26226 - protein, 92 aa, Homo sapiens
ASGYTFTNNDIHWVRQAPGQRLEWMGWVSAANGNTKYSQKFQDRVTITRDPSATTAYMELSSLTSEDTAVYYCARSRSCDYRGQGTLVTVSS

SEQ ID NO: 26227 - protein, 92 aa, Homo sapiens
ASGYTFTNNDIHWVRQAPGQRLEWMGWVSAANGNTKYSQKFQDRVTITRDPSATTAYMELSSLTSEDTAVYYCARSRSCDYWGQGTLVTVSS

SEQ ID NO: 26228 - protein, 94 aa, Homo sapiens
AASGFTFSSYWMNWVRQAPGKGLEWVANIKHDGSETYYVDSVKGRFTISRDNAKNSLYLQVNSLRVEDTAVYYCVRGSGYYIYWGQGTLVTVSS

SEQ ID NO: 26229 - protein, 94 aa, Homo sapiens
AASGFTFRSYWMSWVRQAPGKGLEWVANIKHDGSEKNYVDSVKGRFTISRDNAKNSLYLQMNSLRAEDTAVYYCVRGSGYYIYWGQGTLVTVSS

SEQ ID NO: 26230 - protein, 94 aa, Homo sapiens
AASGFTFSNHWMSWVRQAPGKGLEWVATIKEDGTEKYYVDSVEGRFTVSRDNARNSQYLQMNSLRAEDTAVYYCVRGSGYYIYWGQGTQVTVSS

SEQ ID NO: 26231 - protein, 99 aa, Homo sapiens
AASGFTFSGSAMHWVRQASGKGLEWVGRIRSKGNNYATAYAASVKGRFTISRDDSKNTAYLQMNSLKTEDTAVYYCTRPRGAGNWLDPWGQGTLVTVSS

SEQ ID NO: 26232 - protein, 99 aa, Homo sapiens
AASGFTFSGSAMHWVRQASGKGLEWVGRIRSKGNNYATTYAASVKGRFTISRDDSKNTAYLQMKSLKTEDTAVYYCTRPRGAGNWLDPWGQGTLVTVSS

SEQ ID NO: 26233 - protein, 99 aa, Homo sapiens
AASGFTFSASAMHWVRQASGKGLEWVGRIRSKANNYATAYTASLKGRFSISRDDSKNTAYLQMNSLKTEDTAVYFCTRPRGAGNWLDPWGQGTLVTVSS

SEQ ID NO: 26234 - protein, 92 aa, Homo sapiens
ASGYTFISYDIHWVRQATGQGLEWMGSMNPKNGNTRLVQKFQGRVTMTRNTSIGTAYLELENLRSDDTAIYYCARGERLDTWGQGTLVTVSS

SEQ ID NO: 26235 - protein, 92 aa, Homo sapiens
ASGYTFSIFDISWVRQAPGQGLEWMGWMNPKNGNTGYAQKFQGRVTMTRDTSMSTAYMEVISLRPEDSGIYYCARGERLDTWGQGTLVSVSS

SEQ ID NO: 26236 - protein, 95 aa, Homo sapiens
AASGFSFSNTWMNWVRQVPGKGLEWIGRIKGKAEGVTTDYATAVKGKFTISRDDSKNTLYLQMTSLKSEDTGLYYCANGSWFDPWGQGTLVTVSS

SEQ ID NO: 26237 - protein, 95 aa, Homo sapiens
AASGFTFSYAWMSWVRQAPGKGLEWVGRIKSKTDGGTTDYAAPVKGRFTISRDDSKNTLYLQMNSLKIEDTAVYYCANGSWFDPWGQGTLVTVSS

SEQ ID NO: 26238 - protein, 98 aa, Homo sapiens
ISGDSVSSNSVTWNWIRQSPSRGLEWLGRTYYRSKWHNDYAVSVKSRITINPDTSKNQFSLQLNSVTPEDTAVYYCARSGSGGSLDYWGQGTLVTVSS

SEQ ID NO: 26239 - protein, 98 aa, Homo sapiens
ISGDSVSSNSAAWNWIRQSPSRGLEWLGRTYHRSKWNNNYAVSVKSRITINPDTSKNQFSLQLNSVTPEDTAVYYCARSGSGGSLDYWGQGTLVTVSS

SEQ ID NO: 26240 - protein, 96 aa, Homo sapiens
ASGYSITRYSVHWVRQAPGQILEWMGWIHASTGDAGYSQEFQGRVTITRDTSANTVYMELGSLTSEDTGAYFCARDDGNTWLLDYWGQGTLVTVSS

SEQ ID NO: 26241 - protein, 96 aa, Homo sapiens
ASGYTFNRYSIHWVRQAPGQRLEWMGWINGANGNIEYSQKFQGGVTITWDTSANTVYMELKSLKSDDMALYFCARDDGNTWLLDYWGQGSLVTVSS

SEQ ID NO: 26242 - protein, 91 aa, Homo sapiens
AASGFSLSSYSMSWVRQAAGKGLECVSVISSSGTTYYADSVKGRFTISRDNSKNTLYLQMNSLRVEDTALYYCARHGGDYWGQGTLVTVSS

SEQ ID NO: 26243 - protein, 92 aa, Homo sapiens
AASGFTFNNYAMTWVRQAPGKGLEWVSSLSGDGGSTYYADSVKGRFTISRDNSKNTLSLQMNSLRAEDTALYYCARHGGDYWGQGTLVTVSS

SEQ ID NO: 26244 - protein, 101 aa, Homo sapiens
AASGFTFSNYWMHWVRQAPGKGLVWVSRINSDEVDTTHADSVKGRFTISRDNAKNTVYLQMNSLRAEDTAIYYCARGGISSWTRPYFFDYWGQGTLVTVSS

SEQ ID NO: 26245 - protein, 101 aa, Homo sapiens
AASGFTFSDYWLHWVRQGPGKGLVWVSRIKSDETTKYYADTVKGRFTISRDNAKNTVYLQMNGLRAEDTAVYYCARGGISSWTRPYFFDYWGQGTLVTVSS

SEQ ID NO: 26246 - protein, 88 aa, Homo sapiens
SGFTFSISDMNWVRQAPGKGLEWISRVNGRGDFTYYVDSVKGRFTISRDNSKNILYLQMNSLRSEDTAVYYCAGLWQWGQGTLVTVSS

SEQ ID NO: 26247 - protein, 90 aa, Homo sapiens
VASGVTFSNYDMHWVRQVPGKGLEWVSSIFGGDGRTYYADSVKGRFTVSRDTSKDTVYLQMNSLRAEDTAVYFCAGLWQWGQGTLVTVSS

SEQ ID NO: 26248 - protein, 95 aa, Homo sapiens
AASGFTFSYIWMSWVRQAPGKGLEWVGRIKSKTDGGTTDYAAPVKGRFTISRDDSNNTLYLQMKSLQTEDTAVYYCVTDDDGAYWGQGTPVIVSS

SEQ ID NO: 26249 - protein, 95 aa, Homo sapiens
VASGFSFSYIWMSWVRQAPGKGLEWVGRIRSNDDGGTTDIAEAVKGRFIISRDDSRNTVYLEMNRLKTEDTGRYYCVTDDDGAYWGQGTLVAVSS

SEQ ID NO: 26250 - protein, 95 aa, Homo sapiens
AASGFTFSYIWMSWVRQAPGKGLEWVGRIRSNTDGGTTDYAAPVKGRFIISRDDSKNTVFLHMNSLKTEDTGVYYCVTDDDGAYWGQGALVTVSS

SEQ ID NO: 26251 - protein, 91 aa, Homo sapiens
AASGFTFSSYWMSWVRQAPGKGLEWVANIKQDGSETYYVDSVKGRFTISRDNANNSLYLQMHNLRAEDTAVYYCASGTAHWGQGTLVTVSS

SEQ ID NO: 26252 - protein, 91 aa, Homo sapiens
AASGFTFSDYWMSWVRQAPGKGLEWVANIKQDGSEKYYVDSVKGRFTISRDNAKNSLFLQMNSLRAEDTALYYCASGTAHWGQGTLVTVSS

SEQ ID NO: 26253 - protein, 91 aa, Homo sapiens
AASGFTFSSYWMSWVRQAPGKGLEWVANIKQDGNEKYYVDSVKGRFTISRDNAENSLYLQMNSLRAEDTAVYYCASGTAHWGQGTLVTVSS

SEQ ID NO: 26254 - protein, 100 aa, Homo sapiens
TVSGASINHRSFYWGWIRQPPGKGLEWIGNIYYSGNTYYKPSLKSRVTISVDTSKNQFSLNMKSVTAADTAVYYCARHDVGYSTSWFLDSWGQGALVTVS

SEQ ID NO: 26255 - protein, 101 aa, Homo sapiens
TVSGGSINTRSYYWGWIRQPPGKGLEWIGNIYYSGNTYYKPSLKSRLTISVDTSKDQFSLKLTSVTAADTAVYYCARHDVGYSTSWFLDSWGQGTLVTVSS

SEQ ID NO: 26256 - protein, 95 aa, Homo sapiens
AASGFTFRDYWMSWVRQAPGKGLEWVADIKYDAGQKNYVDSVKGRFSISRDDARNSLYLRMNSLRVEDTAIYYCARVAASGLDYWGQGVLVTVSS

SEQ ID NO: 26257 - protein, 95 aa, Homo sapiens
AASGFVFSDYWMGWVRQAPGQGLEWVANLQYDDGEINYADTVKGRFTISRDDVKTSLYLQMNSLRAEDTAVYYCARVAASGLDYWGQGTQVTVSS

SEQ ID NO: 26258 - protein, 94 aa, Homo sapiens
AASGFTFSSQAMSWVRQAPGKGLEWVSVVYGSGNSAYADSVKGRFTISRDTSKNTLFLQMNSLRAEDTAIYYCVKGSSWGGDYWGQGTLVTVSS

SEQ ID NO: 26259 - protein, 98 aa, Homo sapiens
AASGFTFTTQAMSWVRQAPGKGLEWVSFISGDWGSGVSTYYADSVKGRFTISRDNSKNTLYLLMNSLRAEDTAVYYCVKGSSWGGDYWGQGTRVTVSS

SEQ ID NO: 26260 - protein, 96 aa, Homo sapiens
TVSSGSISGTSYYWGWIRQPPGKGLEWIGSVYYSGSTYYNPSLKSRVTISVDTSKNHFSLKLRSVTAADTAVYYCARRDGGWFDPWGQGTLVTVSS

SEQ ID NO: 26261 - protein, 96 aa, Homo sapiens; identical to SEQ ID NO: 26260

SEQ ID NO: 26262 - protein, 96 aa, Homo sapiens
TVSGGSISSSSYYWGWIRQPPGKGLEWIGNIYYSGSPYYNPSLKSRVTISLDTSKNQFSLKLSSVTAADTAVYYCARRDGGWFDPWGQGTLVTVSS

SEQ ID NO: 26263 - protein, 101 aa, Homo sapiens
AASGFIFSSYAMHWVRQAPGKGLEWVAIISSDGTNKYYADSVKGRFTISRDNSKNTLYLQMNSLRAEDTAMYYCARGRLPSHYYYYGMDVWGQGTTVTVSS

SEQ ID NO: 26264 - protein, 101 aa, Homo sapiens; identical to SEQ ID NO: 26263

SEQ ID NO: 26265 - protein, 101 aa, Homo sapiens
AASGFTFSNYAMHWVRQAPGKGLEWVAVISYDGSNKYYADSVKGRFTISRDNSKNTLYLQMNSLRAEDTAVYYCARGRLPSHYYYYGMDVWGQGTTVTVSS

SEQ ID NO: 26266 - protein, 97 aa, Homo sapiens
TVSGVSISTSNSYWGWIRQPPGKGLEWIGSIYYSGSTYYNPSLKSRVTISLDTSKNQFSLKLNSVTAADTAVYYCARPYSDHAFDIWGQGTMVTVSS

SEQ ID NO: 26267 - protein, 97 aa, Homo sapiens
TVSGVSLSSSNSYWGWIRQPPGKGLEWVGSIYYSGNTYYKPSLKSRVTISLDTSKNQFSLKLTSVTAADTAVYYCARPYSDHAFDIWGQGTMVTVSS

SEQ ID NO: 26268 - protein, 97 aa, Homo sapiens
TVSGGSLSSGTYYWAWIRQPPGKGLEWIGSIYYSGTTYYSPSLKSRVTISIDTSKNQFSLRLSSVTAADTALYYCARPYSDHAFDIWGQGTVVTVSS

SEQ ID NO: 26269 - protein, 96 aa, Homo sapiens
AASGFTFSSFEMNWVRQAPGKGLEWVSHISSSGSTIYYADSVKGRFTISRDNAKNSLYLQMNSLRAEDTAVYYCARDWRVYYFDYWGQGTLVTVSS

SEQ ID NO: 26270 - protein, 96 aa, Homo sapiens
AASGFTFSSYSMNWVRQAPGKGLEWISYISSSTTTIYYADSVKGRFTISRDNVHNSLYLQMTSLRDEDTAVYYCARDWRVYYFDYWGQGTLVTVSS

SEQ ID NO: 26271 - protein, 100 aa, Homo sapiens
AASGFSVSNYGTHWVRQPPGKGLEWVAMMPHDGSTPYYTDSVKGRFIISRDNSKNTVFLQMNSLRVDDTALYYCARDWGISGWYNWFDPWGQGTLVTVSS

SEQ ID NO: 26272 - protein, 99 aa, Homo sapiens
AASGFTFSNYGMHWVRQAPGKGLEWVAIIAYDGTIKYEDSVEGRFTISRDNSKNTLYLQMNSLRPEDTAVYYCARDWGISGWYNWFDPWGQGTLVTVSS

SEQ ID NO: 26273 - protein, 97 aa, Homo sapiens
TVSGDSISSYFWSWIRQPPGKTLEWIAYIHYSGNTNYNPSLKSRVTISVDTSKNQVSLKLRSVTAADTAVYYCARHYASGTYPLDHWGQGTLVTVSS

SEQ ID NO: 26274 - protein, 97 aa, Homo sapiens
TVSGDSVNNYYWSWFRQTPGKGLEWIGYNHYSGTSNYNPSLKSRLTISVDTSRNQISLKLNSVTAADTAVYYCARHYASGTYPLDHWGQGTLVIVSS

SEQ ID NO: 26275 - protein, 96 aa, Homo sapiens
AASGFTFSDHNMEWVRQAPGKGLEWVGRARSKHDRYTVQYAASVKGRFTISRVDSQNSLYLQMNSLRTEDTAVYYCASSLNYYSWWGQGTLVTVSS

SEQ ID NO: 26276 - protein, 96 aa, Homo sapiens
AASGFTFSDHNMDWVRQAPGKGLEWVGRTRNKADSYTTEYAASVKGRFTISRDDSKNSLYLQMNSLKTEDTAVYYCASSLNYYSWWGQGTLVTVSS

SEQ ID NO: 26277 - protein, 90 aa, Homo sapiens
ASGFTFSKSAIQWVRQARGQRLEWIGWIVVGSGDTNYAQKFQERVTITRDMSTSTAYMDLSSLKSEDTAVYYCVADWAVWGQGTLVTVSS

SEQ ID NO: 26278 - protein, 90 aa, Homo sapiens
ASGFTFSRSAMQWVRQARGQHFEWMGWVVVDSGDTKYAQKFQERVTMTRDMSTNTAYMELNSLTSDDTAVYYCVADWAVWGQGTLVTVSS

SEQ ID NO: 26279 - protein, 104 aa, Homo sapiens
AASGFTFSNYDMNWVRQVPGKGLEWVSSISGTRSYRYYADSVKGRFTISRDNAKNSLSLQMSSLRAEDTAVYYCARETYGSGSYFDYYYGMDVWGQGTTVTVSS

SEQ ID NO: 26280 - protein, 104 aa, Homo sapiens
AASGFTFSSYSMNWVRQAPGKGLEWVSSISSSSRYIYYADSVKGRFTISRDNAKNSLYLQMNGLRAEDTAVYYCARETYGSGSYFDYYYGMDVWGQGTTVTVSS

SEQ ID NO: 26281 - protein, 96 aa, Homo sapiens
ASGYTFTKYGITWVRQAPGQGLEWMGWMSADNGNTDYAQKLQGRITMTTDTSTSTAYMDLRTLRSDDTAMYYCARFGVTGDGSDIWGQGTMVTVSS

SEQ ID NO: 26282 - protein, 96 aa, Homo sapiens
ASGYTYTTYGISWVRQAPGQGLEWMGWISADNGNTDYAQKLQGRVTMTTDTSTSTAYMELRSLRSDDTAVYYCARFGVTGDGSDIWGQGTMVTVSS

SEQ ID NO: 26283 - protein, 99 aa, Homo sapiens
GTSGFTFNTYEMNWVRQAPGKGLEWISYINRSGSLIYYADSVKGRFTISRDNAKNELYLQMNSLRAEDTAVYYCARERCSTNSCYLNYWGQGTLVTVSS

SEQ ID NO: 26284 - protein, 99 aa, Homo sapiens
AASGFTFSSYEMNWVRQAPEKGLEWVSYINRGSSLIKYADSVKGRFTISRDNAKDSLYLQMNSLRAEDTAVYYCARERCSTNSCYLNYWGPGTLVTVSS

SEQ ID NO: 26285 - protein, 100 aa, Homo sapiens
AASGFTFSSHWMDWVRQVPGKGLVWVSRIQIDGSSADYVAYADFVRGRFTISRDNAKNTLYLQMNSLSVEDTAVYYCARDGGYGTPFDYWGQGTLVTVSS

SEQ ID NO: 26286 - protein, 100 aa, Homo sapiens
AASGFSFSSHWMDWVRQVPGKGLVWVSRIQIDGSSSNYVSYADFVKGRFTISRDNAKNTLYLQMNSLSAEDTAVYYCARDGGYGTPFDYWGQGTLVTVSS

SEQ ID NO: 26287 - protein, 96 aa, Homo sapiens
ASGFTFSNYWVHWVRQAPGKGPVWVSRITSDGSTTAYADSVKGRFTISRDNAKNTVFLQMNSLRAEDTAVYYCARDGGYGTPFDYWGQGTLVTVSS

SEQ ID NO: 26288 - protein, 96 aa, Homo sapiens
ASGFTFSNYWIHWVRQAPGKGPVWVSRITYDGSTTAYADSVKGRFTISRENAKNTVYLQMNSLRAEDTAVYYCARDGGYGTPFDYWGQGTMVTVSS

SEQ ID NO: 26289 - protein, 99 aa, Homo sapiens
AASGFTFSNAWMTWVRQSPGKGLEWVGRIKSKIDGETTDYSAPVKGRFTISRDDSKDTLYLQMNSLRIEDTAVYYCSTNFYGSGPFDYWGQGTLVTVSS

SEQ ID NO: 26290 - protein, 99 aa, Homo sapiens
AASGFTFSNAWMTWVRQAPGKGLEWVGRIKSKTDGGTIDYAAPVKGRFTISRDDSKNTLYLQMNSLKTEDTAVYYCSTNFYGSGPFDYWGQGTLVTVSS

SEQ ID NO: 26291 - protein, 98 aa, Homo sapiens
TLSAGSIRSYYWSWIRQPPGKGLEWIGYIYYTGSTTYNPSLKSRVTISVDTSKIQFSLKLSSVTAADTAFYYCARAGYIYGADAFDIWGQGTLVTVSS

SEQ ID NO: 26292 - protein, 98 aa, Homo sapiens
TVSGGSISSFYWSWIRQPPGRGLEWIGYVSYSENISYNPSLKSRVTISVDTSKNQLALKVRPVTAADTAVYYCARAGYIYGADAFDIWGHGKMVTVSS

SEQ ID NO: 26293 - protein, 92 aa, Homo sapiens
ASSGFTFYSYAMTWVRQAPGKGLDWVSLIDSGGRNTYYADSVKGRFSISRDNSKNMLYLQMNSLRAEDTAIYYCARGDGLDWGQGTLVTVSS

SEQ ID NO: 26294 - protein, 92 aa, Homo sapiens
VVAGLTFSSHGMTWLRQAPGKGLEWVSTISGSGGGTHYADSVRGRFTISRDNSRSTFYLQMNSLRADDTAVYYCARGDGLDWGQGTLVSVSS

SEQ ID NO: 26295 - protein, 99 aa, Homo sapiens
IVSGGSISTRNYYWGWIRQPPGKGLECIGSVYYSGITYYNPSLKSRVTISVDTSKNQFSLKLSSVTAADTAVYYCARHWSSGWDYFDYWGQGTLVTVSS

SEQ ID NO: 26296 - protein, 99 aa, Homo sapiens
TVSGGSISSSRYYWSWIRQPPGKGLECIGSIYYSGNTYYNPSLKSRVTISLDSSKNQFSLKLNSVTAADTAVFFCARHWSSGWDYFDYWGQGTLVTVSS

SEQ ID NO: 26297 - protein, 99 aa, Homo sapiens
ISGDSVSGSSGAWNWIRQSPSRGLEWLGRTYHSSKWYNDYAVSVKSRITINPDTSKNQFSLQLDSVTPEDTAVYYCARGWLRSGGFAYWGQGALVTVSS

SEQ ID NO: 26298 - protein, 99 aa, Homo sapiens
ISGDSVSGNSGAWNWIRQSPSRGLEWLGRTYYGSKWQNDYAVSVKSRITINPDTSKNQFTLQLNSVTPEDTAVYYCARGWLRSGGFAYWGQGTLVTVSS

SEQ ID NO: 26299 - protein, 97 aa, Homo sapiens
AASGFTFSDHYMDWVRQTPGKGLEWVGRIRKKVNSYTTEYAASVKGRFIISRDDSKNSLYLQMNSLRTEDTAMYFCARVLGNYLDYWGQGTLVTVPS

SEQ ID NO: 26300 - protein, 97 aa, Homo sapiens
AASGFTFSDHYMDWVRQAPGKGLEWVGRIRNKPSSYTTEYAASVKGRFSISRDDSKNALFLQMNSLKTEDTAVYYCARVLGNYLDYWGQGTLVTVSS

SEQ ID NO: 26301 - protein, 93 aa, Homo sapiens
TVSGGSISSYYWSWIRQPPGKGLEWIGYIYYSGSTNYNPSLKSRVTMSVDTSKNQFSLKLSSVTAADTAVYYCARGGTSWGYWGQGTLVTVSS

SEQ ID NO: 26302 - protein, 93 aa, Homo sapiens
TVSGGSISSFFWSWIRQPPGKGLEWIGYIYYSGTTNYNPSLKSRVTISVDTSKNQFSLMLSSVTSADTAVYYCARGGTSWGYWGQGTLVTVSS

SEQ ID NO: 26303 - protein, 96 aa, Homo sapiens
AASGFTFSSYWMHWVRQAPGKGLVWVSRINSDGSTTSFADSVKGRFTISRDNAKNTLYLQIKSLRPEDTAVYYCAREGSGWTIDYWGQGTLVTVSS

SEQ ID NO: 26304 - protein, 96 aa, Homo sapiens
AASGFSLSSNWMNWVRQAPGKGLAWVSRINSDGGTTTYADSVQGRFTISRDNAKNTLYLQMNSLRPEDTAVYYCAREGSGWTIDYWGRGTLVTVSS

SEQ ID NO: 26305 - protein, 96 aa, Homo sapiens
AASGFSLSSNWMNWVRQAPGKGLVWVSRINSDGSSTTYADSVKGRFTISRDNAKNTLYLQMNSLRPEDTAVYYCAREGSGWTIDYWGRGTLVTVSS

SEQ ID NO: 26306 - protein, 96 aa, Homo sapiens
ASSGFTFSSYWMTWVRQAPGKGLEWVASIKTDESEKKYVDSVKGRFTISRDNAKNSVHLQMNSLRAEDTAVYYCARLVGWGRFDAWGQGSLVTVSS

SEQ ID NO: 26307 - protein, 96 aa, Homo sapiens; identical to SEQ ID NO: 26306

SEQ ID NO: 26308 - protein, 96 aa, Homo sapiens; identical to SEQ ID NO: 26306

SEQ ID NO: 26309 - protein, 96 aa, Homo sapiens
AASGFTFGSYWMTWVRQAPAKGLEWVASIKFDGSDKRYMDSVRGQFTISRDNAENSMFLHIGSLRPDDTAVYYCARLVGWGRFDAWGRGTLVIVSS

SEQ ID NO: 26310 - protein, 98 aa, Homo sapiens
AASGFSFSDYTMHWIRQAPGKGLEWVTVISYDGSQKYYVDSVKGRFAISRDNSKSTLYLQMNSLRTEDTAVYYCVRSNSSSWHYFDYWGQGSLVTVSS

SEQ ID NO: 26311 - protein, 98 aa, Homo sapiens
EASGFTFSPYTLHWVRQAPGTGLEWVAVISYDGGQKYYVDSVKGRFTISRDNSKNTLFLQMNSLRSEDTAVYFCVRSNSSSWHYFDYWGQGALVTVSS

SEQ ID NO: 26312 - protein, 98 aa, Homo sapiens
EASGFTFSPYTLHWVRQAPGTGLEWVAVISYDGSQKYYVDSVKGRFIISRDNSKNTLFLQMNSLRAEDTALYFCVRSNSSSWHYFDYWGQGALVIVSS

SEQ ID NO: 26313 - protein, 98 aa, Homo sapiens
EASGFTFSPYTLHWVRQAPATGLEWVAVISYDGRQKYYVDSVKGRFTISRDNSKNTLFLQMKSLRSEDTAVYFCVRSNSSSWHYFDYWGQGALVTVSS

SEQ ID NO: 26314 - protein, 95 aa, Homo sapiens
AASGFTFSRYWMHWVRQAPGKGLVWVSRSNEHGSIRNYADSVKGRFTISRDNDKNTLYLEMFSLRAEDTAIYYCARDLSGRDDFWGQGTLVTVSS

SEQ ID NO: 26315 - protein, 96 aa, Homo sapiens
AASGFTLSTYWMHWVRRAPGKGLVWVSRINDNDGTYTNYADSVKGRFTISRDIAKNTLYLQMNSLRAEDTAMYYCARDLSGRDDFWGQGTLVTVTS

SEQ ID NO: 26316 - protein, 95 aa, Homo sapiens
AASGYNFNRYWMHWVRQAPGKGLVWVSRINEDERVTNYADSVKGRFTISRDNARDTLYLQMNSLRAEDTAVYYCARDLSGRDDFWGQGTLVTVAS

SEQ ID NO: 26317 - protein, 99 aa, Homo sapiens
ASGYTFTSYDINWVRQATGQGLEWMGWMNPNSGNTGYAQRLKGRVIMTRNTSISTAYMELSSLRSEDTAVYYCARGYRDSSGREYFQHWGQGTLVTVSS

SEQ ID NO: 26318 - protein, 99 aa, Homo sapiens
ASGYTFTTYDINWVRQATGQGLEWMGWMNPNSGNTGYAQKFQGRVTMTRNTSISTAYMELSSLTSEDTAVYYCARGYRDSSGREYFQHWGQGTLVTVSS

SEQ ID NO: 26319 - protein, 99 aa, Homo sapiens
VASGFTFNSYVMTWVRQGPGKGLEWISGITGSGGDTYHADSVKGRFIISRDNSKNTLYLQMNSLRAEDTALYYCVKGSGSSRPYYFDYWGQGTLVTVSS

SEQ ID NO: 26320 - protein, 98 aa, Homo sapiens
ASGFTFSTLAMSWVRQAPGQGLEWVSAITGSSGSTYLADSVKGRFTISRDNSKNTLYLQMDSLKGEDTALYYCVKGSGSSRPYYFDYWGQGTLVTVSS

SEQ ID NO: 26321 - protein, 99 aa, Homo sapiens
AASGFTFSTLTMSWVRQAPGQGLEWVSAITGSSSNTYLADSVKGRFTISRDNSKSTLYLQMNSLRAEDTAVYYCVKGSGSSRPYYFDYWGQGTLVTVSS

SEQ ID NO: 26322 - protein, 99 aa, Homo sapiens
AASGFTFSDYVMSWVRQAPGMGLEWVSAITGGGGSTYDADSVKGRFTISRDNSKKTLYLQMNSLRAEDTAIYYCVKGSGSSRPYYFDYWGQGTLVTVSS

SEQ ID NO: 26323 - protein, 99 aa, Homo sapiens
AASGFTFSTLAMSWVRQAPGQGLEWVSAITGSSGSTYFADSVKGRFTISRDNSKSTLYLQMNSLKAEDTAVYYCVKGSGSSRPYYFDYWGQGTLVTVSS

SEQ ID NO: 26324 - protein, 97 aa, Homo sapiens
ISGDSVSSIHVAWGWIRQSPSRGLEWLGRTYYRSKWYNDFALSVKSRITINPDTSQNQFSLQLNFVTPDDTAVYYCARERDRAFDIWGQGTMVTVSS

SEQ ID NO: 26325 - protein, 97 aa, Homo sapiens
ISGDSVSSFGVAWAWIRQSPSRGLEWLGRTYYRSKWSNDFALSVKSRITINPDTSQNQFSLQLSFVTPDDTAVYYCARERDRAFDIWGQGTMVTVSS

SEQ ID NO: 26326 - protein, 97 aa, Homo sapiens
ISGDSVSSNSAAWNWIRQSPSRGLEWLGRTYYRSKWYYDYAMSMKSRISVDPDTSKNQFSLHLNSVTPEDTALYYCARERDRAFDIWGQGTVVTVSS

SEQ ID NO: 26327 - protein, 97 aa, Homo sapiens
AASGFTFSNYWMHWVRQVPGTGLVWVSRLDPDGDSIEYVDSVKGRFTISRDDAENTLYLQMSSLRAEDTAVYYCVRGSNDWNGVDYWGQGTLVTVSS

SEQ ID NO: 26328 - protein, 96 aa, Homo sapiens
AASGFTFRSYWMHWVRQVPGKGLMWVSHINGDGTVIQDAESVEGRFTISRDNARNTLYLQMNDLGAEDTALYYCVRGSNDWNGVDYWGQGILVTVS

SEQ ID NO: 26329 - protein, 96 aa, Homo sapiens
AASGFTFSGYWMHWVRQAPGEGLVWVSRIDIDVRWTDYADSVKGRFTISRDNAKNTLYLQMNSLTVEDSAVYYCVRGSNDWNGVDYWGQGTLVTVS

SEQ ID NO: 26330 - protein, 97 aa, Homo sapiens
AASGFTFSSYWMHWVRQAPGKGLVWVSRISDDRYTIDYAGSVKGRFTISRDDAKNTLYLQMNSLRDEDTAVYYCVRGSNDWNGVDYWGQGTLVTVSS

SEQ ID NO: 26331 - protein, 97 aa, Homo sapiens
AASGFTFSIYWMHWVRQVPGKGLVWVSRISDDRYTIDYADSVKGRFTISRDDAKNTLYLQMNSLRDEDTAVYYCVRGSNDWNGVDYWGQGTSVTVSS

SEQ ID NO: 26332 - protein, 95 aa, Homo sapiens
ASGYTFARFGITWVRQAPGQGLEWMGWIGGGNTDYAEKVQGRVTLTTDTSTFTAYMELRSLRSDDTAVYYCARAGAEVTSHFDYWGLGTLVTVSS

SEQ ID NO: 26333 - protein, 97 aa, Homo sapiens
ASGYSFNIFGITWVRQAPGQGLEWMGWIGSDNGNTNYAQKVQDRVTMTTDPSARTAYLELRGLRSDDTAVYYCARAGAEVTSHFDYWGQGTLVIVSS

SEQ ID NO: 26334 - protein, 95 aa, Homo sapiens
APGYTFARFGITWVRQAPGQGLEWMGWIGGGNTDYAEKVQGRVTLTTDTSTFTAYMELRSLRSDDTAVYYCARAGAEVTSHFDYWGLGTLVTVSS

SEQ ID NO: 26335 - protein, 95 aa, Homo sapiens
AASGFTFNSYWMAWVRQAPGKGLEWVANIKQDGSDKNYVDSVKGRFTISRDNAKNSLYLQMNSLRAEDTAVYYCARDNVGALDYWGQGTLVTVSS

SEQ ID NO: 26336 - protein, 94 aa, Homo sapiens
AASGFTFSNYWMAWVRQAPGKGPEWVANVNQDENKKIYVDSVRGRFTISRDNARSSLHLQMNSLRAEDTAVYYCARDNVGALDYWGQGILVTVS

SEQ ID NO: 26337 - protein, 98 aa, Homo sapiens
AASGFTFTDYWMNWVRQAPGKGLEWVANINQDGSDKYYVDSVKGRFTISRDNARNSLFLQMNSLRAEDTAVYYCATDLPIAGAGFDYWGQGTLVTVSS

SEQ ID NO: 26338 - protein, 98 aa, Homo sapiens
AASGFTFTSYWMNWVRQAPGKGLEWVANIDQDGSDTYYVDSVKGRFTISRDNARNSLFLQMNSLRAEDTAVYYCATDLPIAGAGFDYWGQGTLVTVSS

SEQ ID NO: 26339 - protein, 98 aa, Homo sapiens
AASGFTFTTYWMNWVRQAPGKGLEWVGNINQDGREKFYVGSVKGRFTISRDNTKNSLYLQMNSLRADDTAVYYCATDLPIAGAGFDYWGQGTLVTVSS

SEQ ID NO: 26340 - protein, 96 aa, Homo sapiens
AASGFTFSDYYMDWVRQAPGKGLEWVGRTRNKAKSYTTEYAASVKGRFTISRDDSKNSLYLQMNSLQTDDTAVYYCTRGYNGLDVWGQGTTVTVSS

SEQ ID NO: 26341 - protein, 96 aa, Homo sapiens
ATSGFSFSDFYMDWVRQAPGKGLEWVARIRNRAHSYTTEYAESAKGRFTISRDNSRNLLYLQMNALKTEDTAVYYCTRGYNGLDVWGQGTMVTVSS

SEQ ID NO: 26342 - protein, 96 aa, Homo sapiens; identical to SEQ ID NO: 26341

SEQ ID NO: 26343 - protein, 93 aa, Homo sapiens
AASGLTFSKNWMSWVRQAPGKGLEWAAHIKPDGSGKYYVDSTEGRFTVSRDNAKNSLYLQMNSLRVEDTAVYYCVGWGSSSDWGQGTLVTVSS

SEQ ID NO: 26344 - protein, 93 aa, Homo sapiens
EASGVIFSWPWMSWVRQAPGKGLDWVAHTNRDGSATFYVDSVKGRFTISRDNAKKSLFLQMNILRPEDTALYYCVGWGSSSDWGQGTLVTVSS

SEQ ID NO: 26345 - protein, 93 aa, Homo sapiens
AAFGFTFSDYEINWVRQAPGKGLEWVSYVSSSGTTIHYADSVKGRFIMSRDNAKNSVSLQMNSLRVDDTAVYYCARGWEYFDFWGQGALVIVS

SEQ ID NO: 26346 - protein, 92 aa, Homo sapiens
ASGFTFSDYEINWVRQAPGRGLQWISYISSSGETEKYADSVKGRISVSRDNSKNSVNLQMDSLRVEDTAIYYCARGWEYFDFWSQGTLLTVS

SEQ ID NO: 26347 - protein, 92 aa, Homo sapiens
ASGFTFSDYEINWVRQAPGRGLQWISYISSSGETEKYADSVKGRVSVSRDNSKNSVNLQMDSLQVEDTAIYYCARGWEYFDFWSQGTLLTVS

SEQ ID NO: 26348 - protein, 99 aa, Homo sapiens
ASGYTFTSYDINWVRQATGQGLEWMGWMNPNSGNTGYAQKFQGRVTMTRNTSISTAYMDLSSLRSDDTAVYYCARGPNWNDGPYYFDYWGQGTLVTVSS

SEQ ID NO: 26349 - protein, 99 aa, Homo sapiens
ASGYTFTSYDINWVRQATGQGLEWMGWMNPNSGNTGYAQKFQGRVTMTRNTSISTAYMELSSLRSDDTAVYYCARGPNWNDGPYYFDYWGQGTLVTVSS

SEQ ID NO: 26350 - protein, 99 aa, Homo sapiens
ASGYTFTSYDINWVRQATGQGLEWMGWMNPNSGNTGYAQKFQGRVTMTRNTSTSTAYMEVSSLRSEDTAVYYCARGPNWNDGPYYFDYWGQGTLVTVSS

SEQ ID NO: 26351 - protein, 94 aa, Homo sapiens
AASGYIFTAFGMSWVRQPPGKGLEWVSVISANGGLTYYAESMKGRFTISRDDSKNTLYLQMNSLRFEDTAVYYCTRGTTPPDYWGQGTLVIVSS

SEQ ID NO: 26352 - protein, 94 aa, Homo sapiens
AASGYDFTTFGMSWVRQAPGKGLQWVSVISANGAITYYADSVQGRFTISRDDSKNTLFLQMNSLRAEDTALYYCTRGTTPPDYWGQGTLVTVSS

SEQ ID NO: 26353 - protein, 93 aa, Homo sapiens
ASGYAFTTFGMSWVRQAPGKGLQWVSVISANGAITYYADSVQGRFTISRDDSKNTLYLQMNSLRAEDTALYYCTRGTTPPDYWGQGTLVTVSS

SEQ ID NO: 26354 - protein, 94 aa, Homo sapiens
AASGYIFTTFGLSWVRQAPGKGLDWVAVISANGAIIYYADSVQGRFTISRDDSKNILYLQMNSLRAEDTALYYCTRGTTPPDYWGQGTLVTVSS

SEQ ID NO: 26355 - protein, 101 aa, Homo sapiens
ASGFVFKGYVMSWVRQAPGRGLEWVSAIGNVVSSTGSVFENTDYADSVQGRFTIFRDNSKNTLYLQMNNLRLEDTAVYFCARRTGGQKDYWGRGTLVTVSS

SEQ ID NO: 26356 - protein, 95 aa, Homo sapiens
EASGFTFRNYVMSWVRQAPGKGLEWVSAISYNAARTDYADSVKGRFTISRDNSKNTLFLQMNSLRAEDTATYYCARRTGGQKDYWGQGTLVTVSS

SEQ ID NO: 26357 - protein, 95 aa, Homo sapiens
GTSGFTFTPYTMHWIRQGPGKGLVWVARINGPGNIISYADSVKGRFTISRDNAKNALYLQMNSLRAEDTAKYYCARSVEWGYDYWGQGTLVTVSS

SEQ ID NO: 26358 - protein, 95 aa, Homo sapiens
AASGFRFNVYTMHWVRQVPGKGPVWVSRITSDERTISYADSVMGRFTISRDNAKNTLFLQMNNLRVGDSGLYYCARSVEWGYDYWGRGTLVTVSS

SEQ ID NO: 26359 - protein, 96 aa, Homo sapiens
AASGFTFSSYGMHWVRQAPGKGLEWVAVIWYDGSNKYYVDSVKGRFTISRDNSKNTLYLKMNSLRAEDTAVYYCARDRGGSYPDYWGQGTLVTVSS

SEQ ID NO: 26360 - protein, 96 aa, Homo sapiens
AASGFTFSSYGMHWVRQAPGKGLEWVAVISFDGSNKYYVDSVKGRFIISRDNSKNTLYLQMISLRAEDTALYYCARDRGGSYPDYWGQGTLVTVSS

SEQ ID NO: 26361 - protein, 95 aa, Homo sapiens
AASGFTFSSYWMTWVRQAPGKGLEWVANIKQDGTEKYYVDSVKGRFTISRDNAENSLSLQMNSLRAEDTAVYYCARGGDYDLDPWGQGTLVAVSS

SEQ ID NO: 26362 - protein, 95 aa, Homo sapiens
AASGFTFSTSWMTWVRQAPGKGLEWVANIKQDGSEKYYVDSVKGRFTISRDNAKNSLYLQMNSLRVEDTAVYYCARGGDYDLDPWGQGTLVTVSS

SEQ ID NO: 26363 - protein, 98 aa, Homo sapiens
ASGGTFSSYAISWVRQAPGQGLEWMGGIIPIFGTANYAQKFQGRVTITADKSTSTVYMELSSLRSEDTAVYYCARGDYDSSGYYPDYWGQGTLVTVSS

SEQ ID NO: 26364 - protein, 98 aa, Homo sapiens
ASGGTFSSYAISWVRQAPGQGLEWMGRIIPIFGIANYAQKFQGRVTITADKSTSTAYMELSSLRSEDTAMYYCARGDYDSSGYYPDYWGQGTLVTVSS

SEQ ID NO: 26365 - protein, 93 aa, Homo sapiens
ASGYTFTSYDINWVRQATGQGLEWMGWMNPNSGNTGYAQKFQGRVTMTRNTSISTAYMELSSLRSEDTAVYYCARSHYGMDVWGQGTTVTVSS

SEQ ID NO: 26366 - protein, 93 aa, Homo sapiens
ASGYTFTNYDINWVRQATGQGLEWMGWMNPNSGNTGYAQKFQGRVSMTRNTSISTAYMELSSLRSEDTAVYYCARSHYGMDVWGQGTTVTVSS

SEQ ID NO: 26367 - protein, 93 aa, Homo sapiens
AASGFTFSSYWMTWVRQAPGKGLEWVANIKEDGSEKNYVDSVKGRFTISRDNAKSSLYLQMNSLRAEDTAVYYCARGRGVNVWGQGTTVTVSS

SEQ ID NO: 26368 - protein, 93 aa, Homo sapiens
AASGFTFSSYWMTWVRQAPGKGLEWVANIKQDGIEKYYVDSVKGRFTISRDNAKNSLYLQMNSLRAEDTAVYYCARGRGVNVWGQGTTVTVSS

SEQ ID NO: 26369 - protein, 101 aa, Homo sapiens
AASGFSFEDYAMHWVRQAPGKGLEWVSGISWNSNNIAYADSVKGRFTISRDNPKNSLYLQMNSLRPEDTALYYCAKPKSSDWDYHYGMDVWGQGTTVTVSS

SEQ ID NO: 26370 - protein, 101 aa, Homo sapiens
AASGFTFGDYAMHWVRQAPGKGLEWVSGISWNSGSIGYADSVKGRFTISRDNAKNSLYLQMNSLRAEDTALYYCAKPKSSDWDYHYGMDVWGQGTTVTVSS

SEQ ID NO: 26371 - protein, 94 aa, Homo sapiens
ISGDSVSSKSAAWNWIRQSPSRGLEWLGRTFYRSKWSYDYAVSVKSRITINPDTSKNGFSLQLNSVTPEDTAVYYCATLNFDYWGQGILVTVSS

SEQ ID NO: 26372 - protein, 94 aa, Homo sapiens
ISGDSVSSNSAAWNWIRQSPSRGLEWLGRTFYRSKWKNDYAVSVKSRITINPDTSKNQFSLQLNSVTPEDTAVYYCATLNFDYWGQGTLVTVSS

SEQ ID NO: 26373 - protein, 99 aa, Homo sapiens
AASGFTFSDYFMSWMRQAPGKGLEWVSYIGSSDTIKYYADSVKGRFTISRDNAKNSLYLQMNSLRAEDTAVYYCARLGVIAAAGTCDYWGQGTLVTVSS

SEQ ID NO: 26374 - protein, 99 aa, Homo sapiens
AGSGFIFSDYYMSWMRQAPGKGLEWVSYISTSATTIYYADSVKGRFTTSRDNAKNSLYLQMNSLRAEDTAVYYCARLGVIAAAGTCDYWGQGTLVTVSS

SEQ ID NO: 26375 - protein, 99 aa, Homo sapiens
AASGFIFSDYYMSWIRQAPGKGLEWVSYISNSGSTIYYADSVKGRFTTSRDSAKNSLYLQMNSLRAEDTAVYYCARLGVIAAAGTCDYWGQGTLVIVSS

SEQ ID NO: 26376 - protein, 96 aa, Homo sapiens
AASGFTFNTENMNWVRQAPGKGLDWISYISSTGGVIVYADSVKGRFTISRDNARNSLYLQLNSLRDEDTAVYYCARGLGSSWFYHWGQGTLVTVSS

SEQ ID NO: 26377 - protein, 96 aa, Homo sapiens
AVSGITFRNYNMNWVRQAPGRGLEWVSYINEIGDKIFYADSVKGRFTISRDNAKNSLYLQMNSLRDEDTALYYCARGLGSSWFYHWGQGTPVTVSS

SEQ ID NO: 26378 - protein, 97 aa, Homo sapiens
SVSGDSISGSSDYWGWIRQPPGKGLEWIGSLYSSGNSYYNPSLKSRVIMSVDTSKNQFSLKLTSLTAADTAVYYCARHHGPTGPEYWGQGSLVTVSS

SEQ ID NO: 26379 - protein, 97 aa, Homo sapiens
SVSGDSITSSDDYWGWIRQPPGKGLEWIGSIYNSGNTYYNPSLKSRVTISVDTSKNQFSLKLTSVTAADTAVYYCARHHGPTGPEYWGQGTLVTVSS

SEQ ID NO: 26380 - protein, 97 aa, Homo sapiens
IVSGDSISSSTDYWGWIRQPPGKGLEWIGSLYSSGKTHYNPSLKSRVIMSVDTSKNQFSLKMTSLTASDTALYYCARHHGPTGPEYWGQGTLVTVSS

SEQ ID NO: 26381 - protein, 97 aa, Homo sapiens
TVSGDSISGSSDYWGWIRQPPGKGLEWIGSLYSSGNTYYNPSLKSRVIMSVDTSKNQFSLKLTSLTAADMALYYCARHHGPTGPEYWGQGTLVTVSS

SEQ ID NO: 26382 - protein, 99 aa, Homo sapiens
AASGFSFSTYEMNWVRQAPGKGLEWVSYIGTTVNTIYYAGSVKGRFTTSRDNAKNSLYLQMNSLRAEDTAIYYCARETVDCGGDCLDYWGQGTLVTVSS

SEQ ID NO: 26383 - protein, 99 aa, Homo sapiens
AASGFSFSTYEMNWVRQAPGKGLEWVSYIGTAVNTIYYAGSVKGRFTTSRDNAKNSLYLQMNSLRAEDTAIYYCARETVDCGGDCLDYWGQGTLVTVSS

SEQ ID NO: 26384 - protein, 99 aa, Homo sapiens
AASGFSFSTYEMNWVRQAPGKGLEWVSYIDSSGSSIYYADSVKGRFTVSRDNAKSSLFLQMNSLRVEDTAVYFCARETVDCGGDCLDYWGQGTLVTVSS

SEQ ID NO: 26385 - protein, 95 aa, Homo sapiens
AASGYIFSEDWIHWVRQAPGKGLEWVSHIKSDGRRTSYADFVKGRFTISRDNAKNMSFLQMNGLRVEDTGVYYCARDKGYSQDYWGQGTLVTVSS

SEQ ID NO: 26386 - protein, 95 aa, Homo sapiens
AASGFTFSSYWMHWVRQVPGKGLVWVSLIKSDGSRTGYADSVKGRFTISRDNAKNTLYLQMNSLRAEDTAVYYCARDKGYSQDYWGQGTLVTVSS

SEQ ID NO: 26387 - protein, 95 aa, Homo sapiens; identical to SEQ ID NO: 26386

SEQ ID NO: 26388 - protein, 98 aa, Homo sapiens
AASGFTFSTYSMNWVRQAPGKGLEWVSHISTSGSDKYYADSVKGRFTISRDNAKNSLYLQMNSLRDEDTAVYYCARGSDSYGYWGDYWGQGTLVTVSS

SEQ ID NO: 26389 - protein, 98 aa, Homo sapiens
AASGFNFNTYSMNWVRQAPGKGLEWISYIESSGSSTQYADSVKDRFTISRDNAKNSLYLQMNSLRDEDTAVYYCARGSDSYGYWGDYWGQGALVTVSS

SEQ ID NO: 26390 - protein, 98 aa, Homo sapiens
AASGFTFGSYSMNWVRQPPGMGLQWISYISSSGSETQYADSVKGRFTVSRDTAKNSLYLQMNSLRDDDTAVYYCARGSDSYGYWGDYWGQGTVVIVSS

SEQ ID NO: 26391 - protein, 97 aa, Homo sapiens
AASGFTFSDYYLSWVRQAPGKGLEWVASVNQGGSQKYYVDSLKGRFTISRDNAENSLYLQMNSLRAEDTAVYYCARWRWQQSEFDFWGQGTLVTVSS

SEQ ID NO: 26392 - protein, 97 aa, Homo sapiens; identical to SEQ ID NO: 26391

SEQ ID NO: 26393 - protein, 97 aa, Homo sapiens
AASGFIFSNYWMSWVRQAPGKGLEWVASIKQDGRETYYLDSVKGRFTISRDNAKNSLYLQMDSLRAEDTAVYSCARWRWQQSEFDFWGQGALVTVSS

SEQ ID NO: 26394 - protein, 97 aa, Homo sapiens
AASGFSISGYWMSWVRQAPGEGLEWVASISPDGGEKFYVDSVSGRFTISKDNAKNSLYLQMKSLRAEDTAVFYCARWRWQQSEFDFWGQGTLVTVSS

SEQ ID NO: 26395 - protein, 98 aa, Homo sapiens
AASGFTFTNAWMTWVRQAPGKGLEWVGRIKSKTDGGTTDYATPVKGRFTISRDDSKNTLYLQMNSLKTEDTAVYYCTTVGDFYGSGYWGQGTLVTVSS

SEQ ID NO: 26396 - protein, 98 aa, Homo sapiens
AASGFNFINAWLNWVRQTPGKGLEWVGRIKSKSDGGTTDYAAPVQGRFTISRDDSEDTLYLQLNSLKTEDTGVYYCTTVGDFYGSGYWGQGAPVTVSS

SEQ ID NO: 26397 - protein, 94 aa, Homo sapiens
AVSGFTFSNYWMSWVRQAPGKGLEWVANIKPDGSEKYYVDSVKGRFTISRDNAKNSLYLQMNSLRAEDTAVYYCARGSGGPDYWGQGTLVTVSS

SEQ ID NO: 26398 - protein, 94 aa, Homo sapiens
AASGFTFSDYWMTWVRQAPGKGLEWVANIRRDASEGNYVDSVKGRFTISRDNTKNSLYLQMNNLRAEDTAVYFCARGSGGPDYWGQGTLVTVSS

SEQ ID NO: 26399 - protein, 94 aa, Homo sapiens
AASGFTFTSFWMTWVRQAPGKGLEWVASIKQDGSDKRYVDSVKGRFTISRDNAKNSLYLQMNSLIAEDTAVYFCARGSGGPDYWGQGTLVSVSS

SEQ ID NO: 26400 - protein, 100 aa, Homo sapiens
AASGFSLSEYPINWVRHAPGKGLEWVSAIRGSGGGTYYADSVEGRFTISKDNSKNMIYLQMNSLRAEDTAVYYCAKDRYCTGGICPVDYWGQGTLVTVSS

SEQ ID NO: 26401 - protein, 100 aa, Homo sapiens
AGSGFTSSEYAMNWVRQAPGKGLEWVSIISGSGGTSYYADSVKGRFTISRDHSKNTLYLQMNSLRVEDTAVYYCAKDRYCTGGICPVDYWGQGTLVTVSS

SEQ ID NO: 26402 - protein, 100 aa, Homo sapiens
AGSGFTSSEYAMNWVRQAPGKGLEWVSIISGSGGTAYYADSVKGRFTISRDHSKNTLYLQMNSLRAEDTAVYYCAKDRYCTGGICPVDYWGQGTLVTVSS

SEQ ID NO: 26403 - protein, 101 aa, Homo sapiens
AASGFTFSSYAMSWVRQAPGKGLEWVTIIYRSSTTYYADSVKGRFTIFRDDSKNTLNLQMNSLRAEDTAVYYCAKDRSPGFGELLYPFDYWGQGTLVTVSS

SEQ ID NO: 26404 - protein, 102 aa, Homo sapiens
AASGFTFSSHAMSWVRQAPGKGLEWVSIIYSGSSNTYYADSVKGRFTISRDNSKNTLYLQMNGLRAEDTAVYYCAKDRSPGFGELLYPFDYWGPGTLVTVSS

SEQ ID NO: 26405 - protein, 94 aa, Homo sapiens
ASGYTFTNYAMHWVRQAPGQRLEWMGWISAVNGNTKYSQKFQGRVTITRDTSASTAYMEVSSLRSEDTAVYYCARDRAWAMDVWGQGTTVTVSS

SEQ ID NO: 26406 - protein, 95 aa, Homo sapiens
ASGHTLNHPPAVHWVRQAPGQRLEWMGYVNTLDGHTLYSPRFQDRVILTKDTSASTGYMELSGLRSEDTAVYYCARDRAWAMDVWGQGTTVIVSS

SEQ ID NO: 26407 - protein, 95 aa, Homo sapiens
AASGFTLSSYWMSWVRQAPGKGLEWVANIKQDGSEKYYVDSVKGRFTISRDNAKNSVYLQMNSLRAEDTAVYYCTRAIAAAGNYWGQGTLVTVSS

SEQ ID NO: 26408 - protein, 95 aa, Homo sapiens
AASGFTLSTYWVTWVRQAPGKGLEWVANINQDGSEKYYVDSVKGRFTISRDNAKNSVSLQMNSLRAEDTAVYYCTRAIAAAGNYWGQGTLVTVSS

SEQ ID NO: 26409 - protein, 94 aa, Homo sapiens
KVSGYTFTSYWIAWVRQMPGKGLEWMGIIYPGDSDTRYSPSFQGQVTISADKSISTAYLQWSSLKASDTAMYYCAREDAFFDYWGQGTLVTVSS

SEQ ID NO: 26410 - protein, 93 aa, Homo sapiens
KGSGHSFTNYWIAWVRQMPGKGLEWMGIIYPGDSDTRYSPSFQGQVTISVDKSISTAYLQWSSLKASDTAMYYCAREDAFFDYWGQGTLVTVS

SEQ ID NO: 26411 - protein, 94 aa, Homo sapiens
VASGFTFSSYAMSWVRQAPGKGLEWVSVIYRDGSNTYYADSVKGRFTLSRDNPKNTLYLQMSSLRAEDTAVYYCARGRTSIDYWGQGTLVTVSS

SEQ ID NO: 26412 - protein, 94 aa, Homo sapiens
AASGFTFSSFAMSWVRQAPGKGLEWVSTISASGGRTYYADSVKGRFTISRDNSKNTLYLQMNSLRAEDTAVYYCARGRTSIDYWGQGTLVTVSS

SEQ ID NO: 26413 - protein, 94 aa, Homo sapiens
VASGFTFSNYAMSWVRQAPGKGLEWVSVIYSGGTSTFYADSVKGRFTLSRDNSKNTLYLQMSSLRAEDTAVYYCARGRTSIDYWGQGTLVTVSS

SEQ ID NO: 26414 - protein, 96 aa, Homo sapiens
SDYKFTNYGISWVRQAPGQGLEWMGWINANNGNTNYAQKFQGRVTMTTDTSTTTAFVDLRSLRSDDTAVYYCARDGGRSWGIFDYWGQGTLVTVSS

SEQ ID NO: 26415 - protein, 98 aa, Homo sapiens
SGYRFNNYGISWVRLRQAPGQGLEWMGWINVNNGNTKYAQKFQGRVTMTTETSTSTAYMEFRSLISDDTAVYYCARDGGRSWGIFDYWGQGTLVTVSS

SEQ ID NO: 26416 - protein, 100 aa, Homo sapiens
AASGFTFGSYAMSWVRQAPGKGLEWVAAVGSDNNAIVYAESVKGRFTISKDNSKNTLYLQMNSLRAEDTAIYYCARPIMTVPGTRWFDPWGQGTLVTVSS

SEQ ID NO: 26417 - protein, 100 aa, Homo sapiens
AASGFTFSSYAMSWVRQAPGKGPEWVSAIGSDGSSPYYADSVKGRFTISRDNSKNTLYLQMNSLRAEDTAVYYCARPIMTVPGTRWFDPWGQGTLVIVSS

SEQ ID NO: 26418 - protein, 91 aa, Homo sapiens
AVSGFTFSSFAMSWVRQAPGKGLEWVSAISGRGDTTFYADSVKGRFTISRDNSKNTLYLQMNSLRAEDTAVYYCANARAYWGQGTLVTVSS

SEQ ID NO: 26419 - protein, 90 aa, Homo sapiens
ASGFTFSSYGMSWVRQAPGKGLEWVCTTNARGANANYADSVKGRFTISRDNSKNTLFLQMNNLRVEDTAVYYCANARAYWGQGTLVTVSS

SEQ ID NO: 26420 - protein, 90 aa, Homo sapiens; identical to SEQ ID NO: 26419

SEQ ID NO: 26421 - protein, 99 aa, Homo sapiens
TVSGGSIGTYYWSWIRQTPGKGLEWIGYIDYTGSTNYNPPLNSRVTISLDTSKNQFSLKVSSVTAADTAVYYCARGRRYSGRHDAFDIWGQGTMVTVSS

SEQ ID NO: 26422 - protein, 99 aa, Homo sapiens
TLSGGSTTNYYWSWFRQPPGKGLEWIGYMYYSGDSNYNPSLKSRVTMSIDTSQKQISLKLNSVTAADTAVYYCARGRRYSGRHDAFDIWGQGTMVTVSS

SEQ ID NO: 26423 - protein, 99 aa, Homo sapiens
TVSGGSFSTYYWSWIRQPPGKGLEWIGYIDYSGSTNYNPSLKSRVTISADTSKNQFSLKLSSVTAADRAVYYCARGRRYSGRHDAFDIWGQGTMVTVSS

SEQ ID NO: 26424 - protein, 95 aa, Homo sapiens
AASGFVFTTYWVNWARQAPGEGLMWVALIDPDGTATTYADSVKGRFTISRDNAKNTVYLQMNSLRVADTAVYYCARDYAGSPHSWGQGTLVTVSS

SEQ ID NO: 26425 - protein, 94 aa, Homo sapiens
ASGFTFSNYWMNWVRQTPGKGLVWVSLINGDGTTTTYADSVKGRFTVSRDNAKNTVYLQMNSLRGEDSAVYYCARDYAGSPHSWGQGTLVTVSS

SEQ ID NO: 26426 - protein, 97 aa, Homo sapiens
VASGFTFSNYHMTWVRQAPGKGLEWVAYISRTSGIIYYKDSVKGRFTISRDNAKNSLFLQMNSLRVEDTALYYCARDSGIAGADDHWGQGTRVTVSS

SEQ ID NO: 26427 - protein, 97 aa, Homo sapiens
VASGFTFSNYHMTWVRQAPGKGLEWVAYIRSNSKIIYYKDSVKGRFTISRDNAKNSLFLQMNSLRVEDTALYYCARDSGIAGADDHWGQGTRVTVSS

SEQ ID NO: 26428 - protein, 95 aa, Homo sapiens
VSGFTFSNYPMTWVRQAPGKGLEWVAYIRTSTRIYYKDSVKGRFTISRDNAKNSLFLQMNSLRVEDTAVYYCARDSGIAGADDHWGQGTRVTVSS

SEQ ID NO: 26429 - protein, 97 aa, Homo sapiens
VASGFTFSNYHMTWVRQAPGKGLEWVAYISSNSRIIYYKDSVKGRFTISRDNAKNSLFLQMNSLRVEDTAVYYCARDSGIAGADDHWGQGTRVTVSS

SEQ ID NO: 26430 - protein, 97 aa, Homo sapiens
VASGFTFSNYHMTWVRQAPGKGLEWVAYISSTSTIIYYKDSVKGRFTISRDNAKNSLFLQMNSLRVEDTALYYCARDSGIAGADDHWGQGTRVTVSS

SEQ ID NO: 26431 - protein, 97 aa, Homo sapiens; identical to SEQ ID NO: 26430

SEQ ID NO: 26432 - protein, 97 aa, Homo sapiens
VTSGFSFSNYHMTWVRQAPGKGLEWVAYISRTSSIIYYKDSVKGRFTISRDNAKNSLFLQMNTLRVEDTALYYCARDSGIAGADDHWGQGTRVTVSS

SEQ ID NO: 26433 - protein, 97 aa, Homo sapiens
VASGFTFSNYHMTWVRQAPGKGLEWVAYIRSDSQIIYYKDSVKGRFTISRDNAKNSLFLQMNSLRVEDTALYYCARDSGIAGADDHWGQGTRVTVSS

SEQ ID NO: 26434 - protein, 97 aa, Homo sapiens
VASGFTFSNYHMTWVRQAPGKGLEWVAYISRTSGIIYYKDSVKGRFTISGDNAKNSLFLQMNSLRVEDTALYYCARDSGIAGADDHWGQGTRVTVSS

SEQ ID NO: 26435 - protein, 97 aa, Homo sapiens
VASGFTFSNYHMTWVRQAPGKGLEWVAYISRTSDIIYYKDSVKGRFTISRDNAKNSLFLQMNSLRVEDTALYYCARDSGIAGADDHWGQGTRVTVSS

SEQ ID NO: 26436 - protein, 97 aa, Homo sapiens
VASGFTFSNYHMTWVRQAPGKGLEWVAYISRTSGIIYYKDSVKGRFTISRDNAKNSLFLQMNSLRVEDTALYYCARDSGIAGADDHWGQGTRITVSS

SEQ ID NO: 26437 - protein, 96 aa, Homo sapiens
ASGFTFSNYHMTWVRQAPGKGLEWVAYISRTSGIIYYKDSVKGRFTISRDNAKNSLFLQMNSLRVEDTALYYCARDSGIAGADDHWGQGTRVTVSS

SEQ ID NO: 26438 - protein, 97 aa, Homo sapiens
AASGFTFSSYSMNWVRQAPGKGLEWVSYISSSSSTIYYKDSVKGRFTISRDNAKNSLFLQMNSLRVEDTALYYCARDSGIAGADDHWGQGTRVTVSS

SEQ ID NO: 26439 - protein, 97 aa, Homo sapiens
AASGFTFSSYSMTWVRQAPGKGLEWLAYISRSSRTIYYADSVKGRFSISRDDAKNSLYLQMNGLRAEDTALYYCARDSGIAGADDHWGQGTLVTVSS

SEQ ID NO: 26440 - protein, 97 aa, Homo sapiens
AASGFTFSSYSMTWVRQAPGKGLEWLSYISRSSSTIYYADSVKGRFTISRDDAKNSLYLQMNSLRAEDTALYYCARDSGIAGADDHWGQGTLVTVSS

SEQ ID NO: 26441 - protein, 96 aa, Homo sapiens
ASGFTFSNYHMTWVRQAPGKGLEWVAYISHSSTIIYYKDSVKGRFTISRDNAKNSLILQMNNLRVDDTALYYCARDSGIAGADDHWGQGTRVTVSS

SEQ ID NO: 26442 - protein, 96 aa, Homo sapiens
VVSGFTFSNYPMTWVRQAPGKGLEWVAYIWTSTRIYYKDSVKGRFTISRDNAKNSLFLQMNSLRVEDTAVYYCARDSGIAGADDHWGQGTRVTVSS

SEQ ID NO: 26443 - protein, 96 aa, Homo sapiens
ASGFTFSNYHMTWVRQAPGKGLEWVAYIRSTSSIIYYKDSVKGRFTISRDNAKNSLFLQMNSLRVEDTALYYCARDSGIAGADDHWGQGTRVTVSS

SEQ ID NO: 26444 - protein, 97 aa, Homo sapiens
VASGFTFSNYHMTWVRQAPGKGLEWVAYIRSTSTIIYYKDSVKGRFTISRDNAKNSLFLQMNSLRVEDTALYYCARDSGIAGADDHWGQGTRVTVSS

SEQ ID NO: 26445 - protein, 96 aa, Homo sapiens; identical to SEQ ID NO: 26442

SEQ ID NO: 26446 - protein, 92 aa, Homo sapiens
ASGYTFNTYPVHWVRQAPGQRLEWMGWINVGNGNTKYSQNFQGRLTISRDTSASTVYLELSSLRSGDTAVYYCASGDWFDYWGQGTQVTVSS

SEQ ID NO: 26447 - protein, 92 aa, Homo sapiens; identical to SEQ ID NO: 26446

SEQ ID NO: 26448 - protein, 92 aa, Homo sapiens; identical to SEQ ID NO: 26446

SEQ ID NO: 26449 - protein, 92 aa, Homo sapiens
ASGYTFNSYPVHWVRQAPGLRLEWMGWINVGNGNTKYSQNFQGRLTISRDTSASTVYLELSSLRSEDTAVYYCASGDWFDYWGQGTQVTVSS

SEQ ID NO: 26450 - protein, 92 aa, Homo sapiens
ASGYTFNTYPVHWVRQAPGQRLEWMGWINVGNGNTKYPQNFQGRLTISRDTSASTVYLELSSLRSGDTAVYYCASGDWFDYWGQGTQVTVSS

SEQ ID NO: 26451 - protein, 92 aa, Homo sapiens
ASGYTFNTYPVHWVRQAPGQRLEWMGWINVGNGNTKYSQNFQGRLTISRDTSASTVYLEFSILISGDTAVYYCASGDWFDYWGQGTQVTVSS

SEQ ID NO: 26452 - protein, 92 aa, Homo sapiens
ASAYTFTTHPIHWMRQAPGQRLEWMGWINAGKGNTKFSQRFQGRVTITRDTSASTVYMELSSLRSEDTAVYYCASGDWFDYWGQGTLVTVSS

SEQ ID NO: 26453 - protein, 91 aa, Homo sapiens
SGYTFTTHPIHWMRQAPGQRLEWMGWINAGKGNTKFSQKFQGRVTITRDTSASTVYMELSSLRSEDTAVYYCASGDWFDYWGQGTLVTVSS

SEQ ID NO: 26454 - protein, 91 aa, Homo sapiens
ASGYSYSNFPIHWVRQAPGQRLEWMGWINAGNGNTKYSQNFQDRVTITWDTFATTGFMDLSSLKSEDTAVYYCASGDWFDYWGQGTLVTVS

SEQ ID NO: 26455 - protein, 91 aa, Homo sapiens
SGYTFTTYPMHWVRQAHGQRLEWMGWINVGTGNTKYSREFQGRVTITRDRSGSTAYMELSSLRFEDTAVYYCASGDWFDYWGPGTLVTVSS

SEQ ID NO: 26456 - protein, 91 aa, Homo sapiens
SGYIFTTYPIHWVRQAPGQRLEWMGWINTGNGNTKFSQNFQGRLTITRDTSATTAYMVLSNLRFGDTAIYYCASGDWFDYWGQGTPVTVSS

SEQ ID NO: 26457 - protein, 92 aa, Homo sapiens
ASGFTFNSYSMNWVRQAPGKGLEWVSFIGSSSPTIYYTDSVKGRFAISRDNAKNSVYLQMNSLRVEDTAVYYCARGQDIDYWGQGTRVIVSS

SEQ ID NO: 26458 - protein, 92 aa, Homo sapiens; identical to SEQ ID NO: 26457

SEQ ID NO: 26459 - protein, 93 aa, Homo sapiens
VASGFTFNSYSMNWVRQAPGKGLEWVSFIGSSSPTIYYADSVKGRFAISRDNAKNSVYLQMNSLRVEDTAVYYCARGQDIDYWGQGTRVIVSS

SEQ ID NO: 26460 - protein, 92 aa, Homo sapiens
AGSGFTFSSFSMNWVRQAPGKGLEWISFIGSSTNAIYYADSVKGRFTISRDNAKNSLYLQMNSLRAEDTAVYYCARGQDIDYWGQGTLVTVS

SEQ ID NO: 26461 - protein, 93 aa, Homo sapiens
AASGFTFSSFSMNWVRQAPGKGLEWVSFIDSRSSTMYYADSLKGRFTISRDNAKNSLYLQLNSLRAEDTAVYYCARGQDIDYWGQGTLVTVSS

SEQ ID NO: 26462 - protein, 92 aa, Homo sapiens
AASGFTFSSFSMNWVRQAPGRGLEWISFIGSSTSAMYYADSVKGRFTISRDNAKNSVYLQMNSLRAEDTAVYYCARGQDIDYWGQGTLVTVS

SEQ ID NO: 26463 - protein, 92 aa, Homo sapiens; identical to SEQ ID NO: 26462

SEQ ID NO: 26464 - protein, 93 aa, Homo sapiens
AASGFTFSSFSLNWVRQAPGRGLEWVSFISSTGSTIYYADSVKGRFTISRDNANNSLYLQMNALRAEDTAFYYCARGQDIDYWGQGTLVSVSS

SEQ ID NO: 26465 - protein, 92 aa, Homo sapiens
AASGFTFSSFSMNWVRQAPGKGLEWISFIGSSTSAIYYADSVKGRFTISRDNAKNSVYLQMNSLRAEDTAVYYCARGQDIDYWGQGTLVTVS

SEQ ID NO: 26466 - protein, 93 aa, Homo sapiens
AASGFTFSSFSMNWVRQAPGKGLEWVSFISSGSTTIYYADTVKGRFTISRDNAKNSLYLQMNSLRAEDTAVYYCARGQDIDYWGQGTLVTVSS

SEQ ID NO: 26467 - protein, 92 aa, Homo sapiens
AASGFTFSSFSMNWVRQAPGKGLEWISFIGSSTSAIYYADSVKGRFTISRDNAKNSVYLQMNSLRAEDTAIYYCARGQDIDYWGQGTLVTVS

SEQ ID NO: 26468 - protein, 93 aa, Homo sapiens
AASGFTFSSFSMNWVRQAPGKGLEWVSFIDSRSSTIYYADSLRGRFTISRDNAKNSLYLQVNSLRAEDTAVYYCARGQDIDYWGQGTLVTVSS

SEQ ID NO: 26469 - protein, 98 aa, Homo sapiens
AVYGGPFRGYYWSWIRQPPGKGLEWIGEINHSGSTNYNPSLKSRVTISVDTSKNQISLRLKSVTAADTAVYYCASLWFGDFYYGMDVWGQGTMVTVSS

SEQ ID NO: 26470 - protein, 98 aa, Homo sapiens
AVYGGAFSGYYWSWIRQPPGRGLEWIGEINHSGSTNYNPSLKSRVTISVDTSKNQLSLKLSSVTAADTAVYYCASLWFGDFYYGMDVWGQGTTVTVSS

SEQ ID NO: 26471 - protein, 98 aa, Homo sapiens; identical to SEQ ID NO: 26469

SEQ ID NO: 26472 - protein, 98 aa, Homo sapiens
GVYGGAFSGYYWSWIRQPPGKGLEWIGEINHSGSTNYNPSLKSRATISVDTSKNQLSLKLSSVTAADTAVYYCASLWFGDFYYGMDVWGQGTTVTVSS

SEQ ID NO: 26473 - protein, 98 aa, Homo sapiens; identical to SEQ ID NO: 26469

SEQ ID NO: 26474 - protein, 98 aa, Homo sapiens; identical to SEQ ID NO: 26472

SEQ ID NO: 26475 - protein, 98 aa, Homo sapiens
AVYGASFSGYYWSWIRQPPGKGLEWIGEINDSGSTNYSPSLKSRVTMSVDTSKNQFSLRLSSVTAADTAVYYCASLWFGDFYYGMDVWGQGTTVIVSS

SEQ ID NO: 26476 - protein, 98 aa, Homo sapiens
AVYGGAFSGYYWSWIRQPPGKGLEWIGEINHSGSTNYNPSLKSRVTISVDTSKNQLSLKLSSVTAADTAIYYCASLWFGDFYYGMDVWGQGTSVTVSS

SEQ ID NO: 26477 - protein, 98 aa, Homo sapiens; identical to SEQ ID NO: 26469

SEQ ID NO: 26478 - protein, 94 aa, Homo sapiens
ASGYTFSSYFMHWVRQAPGQGLEWMGIINPSGGTTSYAQTLQGRVTMTRDTSTSTIYMELSSLRSEDTAVYYCARAWEQFFDYWGQGTLVTVSS

SEQ ID NO: 26479 - protein, 94 aa, Homo sapiens; identical to SEQ ID NO: 26478

SEQ ID NO: 26480 - protein, 94 aa, Homo sapiens
ASGYTFTSYWIHWVRQAPGQGPEWMGMINPSGYHTRYGQGFQGRVTLTGDTSTSTVYMELSALRSEDTAVYYCARAWEQFFDYWGQGTLLTVSS

SEQ ID NO: 26481 - protein, 94 aa, Homo sapiens
ASGYTFSSYFMHWVRQAPGQGLEWMGIIDPSGGTTSYAQTLQGRVTMTRDTSTSTIYMELSSLRSEDTAVYYCARAWEQFFDYWGQGTLVTVSS

SEQ ID NO: 26482 - protein, 97 aa, Homo sapiens
AASGFIFSNYAMGWVRQAPGKGLEWVSIISAVNTGTYYGDSVKGRFTITRDNSKSTLFLQMNSLRAEDTAVYYCAKRDLGHGVIDYWGQGVLVTVSS

SEQ ID NO: 26483 - protein, 96 aa, Homo sapiens
VASGFSFSTYAMGWVRQAPGMGLEWVSIISAVNSGTYYADSVKGRFTISRDNSKNTLFLQMNSLRVEDTAIYYCAKRDLGHGVIDYWGQGTLVTVS

SEQ ID NO: 26484 - protein, 94 aa, Homo sapiens
ASGYTFTAHYFHWVRQAPGQGLEWMGWIDPNSGGTKYAQKFQGRVTMTRDTSISTLYMDLSRLRSDDMAVYYCARAVNWGYDYWGQGTPVTVSS

SEQ ID NO: 26485 - protein, 94 aa, Homo sapiens
ASGYTFTAHYFHWVRQAPGQGLEWMGWIDPNSGDTNYAQKFQGRVTMTRDTSISTLYMDLIRLRSDDMAVYFCARAVNWGYDYWGQGTPVTVSS

SEQ ID NO: 26486 - protein, 94 aa, Homo sapiens
ASGYSLTAHYIHWARQAPGQGLEWMGWTDPVSGDTKYKQKFQGRITMARDTSISTVYMELSSLRSDDTAVYYCARAVNWGYDYWGQGALVTVSS

SEQ ID NO: 26487 - protein, 94 aa, Homo sapiens
ASGYTFTAHYFHWVRQAPGQGLEWMGWIDPISGATKYAQKFQGRVTMTRDTSISTVYMDLSRLRSDDMAVYYCARAVNWGYDYWGQGTPVTVSS

SEQ ID NO: 26488 - protein, 94 aa, Homo sapiens
ASGYTFTGHYFHWVRQAPGQGLEWMGWIDPTSGDTNYAQKFQGRATMTRDTSISTVYMDLSRLRSDDTALYYCARAVNWGYDYWGQGTPVTVSS

SEQ ID NO: 26489 - protein, 94 aa, Homo sapiens
ASGYTFTGHYFHWVRQAPGQGLEWMGWIDPNSGGTNYAQKFQGRVTMTRDTSISTVYMDLSRLRSDDMAVYYCARAVNWGYDYWGQGTPVTVSS

SEQ ID NO: 26490 - protein, 95 aa, Homo sapiens
AASGITVSSNYMSWVRQAPGKGLEWVSVIYSGGSIYYADSVKGRFTISRDNSKNTLYLQMNSLRAEDTAVYYCARSYGEYYFDYWGQGTLVTVSS

SEQ ID NO: 26491 - protein, 95 aa, Homo sapiens; identical to SEQ ID NO: 26490

SEQ ID NO: 26492 - protein, 102 aa, Homo sapiens
TVSGGSISSYYWSWIRQPPGKGLEWIGYIYYSGSPNYNPSLKSRVTISVDTSKNQFSLKLSSVTAADTAVYYCATGGGGVVVAGTGGWFDPWSRGTLVTVSS

SEQ ID NO: 26493 - protein, 102 aa, Homo sapiens; identical to SEQ ID NO: 26492

SEQ ID NO: 26494 - protein, 102 aa, Homo sapiens
SVSGGSISSYFWSWIRQPPGKGLEWIGYIHYSGTTTYSPSLKNRVSISVDTSKNQFSLKLRSVTVADTAVYYCATGGGGVVVAGTGGWFDPWGRGILVTVSS

SEQ ID NO: 26495 - protein, 102 aa, Homo sapiens; identical to SEQ ID NO: 26494

SEQ ID NO: 26496 - protein, 95 aa, Homo sapiens
VASGFTFSSYSMNWVRQAPGKGLEWVSYIGYTSTPMTYADSVKGRFTISRDNAKNSLSLQMNSLRDEDTAVYYCVRDHGWAFDYWGQGALVTVSS

SEQ ID NO: 26497 - protein, 95 aa, Homo sapiens
VASGFTFSSYSMNWVRQAPGKGLEWVSYIGYSSTPTSYADSVKGRFTISRDNAKNSLSLQMNSLRDEDTAVYYCVRDHGWAFDYWGQGALVTVSS

SEQ ID NO: 26498 - protein, 95 aa, Homo sapiens
AASGFTFRDFSMNWVRRAPGKGLQWISYIRGDSRNPSYADSVKGRFTISRDNGKNSLYLQMNSLRDEDTAVYYCVRDHGWAFDYWGQGSQVTVSS

SEQ ID NO: 26499 - protein, 95 aa, Homo sapiens
AASGFTFRDFSMNWVRRAPGKGLQWISYIRGDSKNPSYADSVKGRFTISRDNGKNSLYLQMNSLRDEDTAVYYCVRDHGWAFDYWGQGSQVTVSS

SEQ ID NO: 26500 - protein, 95 aa, Homo sapiens
VASGFTFSSYSMNWVRQAPGKGLEWVSYIGYTSTPMSYADSVKGRFTISRDNAKNSLSLQMNSLRDDDTAVYYCVRDHGWAFDYWGQGALVTVSS

SEQ ID NO: 26501 - protein, 94 aa, Homo sapiens
ASGFTFSSYSMNWVRQAPGKGLEWISYIGYTSTPMSYADSVKGRFTISRDNAKNSLSLQMNSLRDEDTAVYYCVRDHGWAFDYWGQGALVTVSS

SEQ ID NO: 26502 - protein, 100 aa, Homo sapiens
TVSGGSISSGSYYWSWIRQPAGKGLEWIGHIYTSGSTKYNPSLKSRVTISVDTSKNQFSLKLSSVTAADTAVYYCAREEYSSGWYYFDYWGQGTLVTVSS

SEQ ID NO: 26503 - protein, 100 aa, Homo sapiens
TVSGGSISSGTYYWSWIRQPAGKGLEWIGRIYTSGSTNYNPSLKSRVTISVDTSKNQFSLKLSSVTAADTAVYYCAREEYSSGWYYFDYWGQGTLVTVSS

SEQ ID NO: 26504 - protein, 100 aa, Homo sapiens
TVSGGSIGSGGYYWTWIRQPAGKGLEWIGRIYSSGSTNYNSSLKSRVTISIDTSKNQFSLNLSSVTAADTAVYYCAREEYSSGWYYFDYWGQGTMVTVSS

SEQ ID NO: 26505 - protein, 100 aa, Homo sapiens
TVSGGSISSGGYYWTWIRQPAGKGLEWIGRIYSSGSTNYNSSLKSRVTISIDTSRNQFSLNLSSVTAADTAVYYCAREEYSSGWYYFDYWGQGTMVTVSS

SEQ ID NO: 26506 - protein, 100 aa, Homo sapiens
TVSGGSINSGGYYWTWIRQPAGKGLEWIGRIYSSGSTNYNSSLKSRVTISIDTSKNQFSLNLSSVTAADTAVYYCAREEYSSGWYYFDYWGQGTLVTVSS

SEQ ID NO: 26507 - protein, 100 aa, Homo sapiens
TVSGGSISSGGYYWTWIRQPAGKGLEWIGRIYSSGSTNYNSSLKSRVTISIDTSKNQFSLNLSSVTAADTAVYYCAREEYSSGWYYFDYWGQGTMVTVSS

SEQ ID NO: 26508 - protein, 100 aa, Homo sapiens
TVSGGSISSGGYYWSWIRQPAGKGLEWIGRIYSSGSTNYNSSLKSRVTISIDTSKNQFSLNLSSVTAADTAVYYCAREEYSSGWYYFDYWGQGTLVTVSS

SEQ ID NO: 26509 - protein, 100 aa, Homo sapiens
TVSGGSISSGGYYWTWIRQPAGKGLEWIGRIYSSGSTNYNSSLKSRVTISIDTSKNQFSLNLSSVTATDTAVYYCAREEYSSGWYYFDYWGQGTMVTVSS

SEQ ID NO: 26510 - protein, 100 aa, Homo sapiens
TVSGGSISSGGYYWTWIRQPAGKGLEWIGRIYSSGSTNYNSSLKSRLTISIDTSKNQFSLNLSSVTAADTAVYYCAREEYSSGWYYFDYWGQGTLVTVSS

SEQ ID NO: 26511 - protein, 100 aa, Homo sapiens
TVSGGSISSGSYYWTWIRQPAGKGLEWIGRIYSSGSTNYNSSLKSRVTISIDTSKNQFSLNLSSVTAADTAVYYCAREEYSSGWYYFDYWGQGTMVTVSS

SEQ ID NO: 26512 - protein, 100 aa, Homo sapiens
TVSGGSISSGGYYWSWIRQPAGKGLEWIGRIYSSGSTNYNSSLKSRVTISIDTSKSQFSLNLSSVTAADTAVYYCAREEYSSGWYYFDYWGQGTLVTVSS

SEQ ID NO: 26513 - protein, 100 aa, Homo sapiens
TVSGGSISSGSYYWSWIRQPAGKGLEWIGHIYTSGSTNYNPSLKSRVTISVDTSKNQFSLKLSSVTAADTAVYYCAREEYSSGWYYFDYWGQGTLVTVSS

SEQ ID NO: 26514 - protein, 92 aa, Homo sapiens
ASGFTFSNYWMTWVRQAPGRGLEWVANIKADGSEKYYVDSVKGRFTISRDNAKNSMYLQMNSLRVEDSALYYCASWVGRDHWGQGTPVTVSS

SEQ ID NO: 26515 - protein, 92 aa, Homo sapiens; identical to SEQ ID NO: 26514

SEQ ID NO: 26516 - protein, 92 aa, Homo sapiens
ASGFIFSNFWMTWVRQAPGKGLEWVASIKHDGSGESYVDSVKGRFTISRDNARSSLFLQMNSLRAEDSAVYYCASWVGRDHWGQGTLVTVSS

SEQ ID NO: 26517 - protein, 96 aa, Homo sapiens
AASGFTFNDYWMHWVRQAPGKGLVWVSRIDRFGVNTNYADFVKGRFTISRDNAKNMLYLQMNSLGAEDMAVYYCSRDPRNKGLDPWGQGTLVTVSS

SEQ ID NO: 26518 - protein, 95 aa, Homo sapiens
ASGFTFSKYWMFWVRQAPGKGLVWVSRINGDGSDTNYADSVKGRFTISRDNAKNTLFLQMNSLRADDTAVYYCSRDPRNKGLDPWGQGTLVTVSS

SEQ ID NO: 26519 - protein, 93 aa, Homo sapiens
GFTFRNFWMFWVRQVPGKGLVWVSRIDGGGGEIDYADSVKGRFTTSRDNSRNILYLQMSSLRVEDTAVYYCSRDPRNKGLDPWGQGTLVTVSS

SEQ ID NO: 26520 - protein, 96 aa, Homo sapiens
AGSGFTFRNFWMFWVRQVPGKGLVWVSRIDGGGGATDYADSVKGRFTTSRDNSKNILYLQMNSLRVEDTAVYYCSRDPRNKGLDPWGQGTLVTVSS

SEQ ID NO: 26521 - protein, 96 aa, Homo sapiens
AGSGFSIRHYWMFWVRQVPGKGLVWVSRIDGSGGETDYADSVKGRFTTSRDNSKNILYLQMDSLRVEDTGVYFCSRDPRNKGLDPWGQGTLVTVSS

SEQ ID NO: 26522 - protein, 96 aa, Homo sapiens
VGSGFTFRNFWMFWVRQVPGKGLVWVSRIDGGGGATDYADSVKGRFTTSRDNSKNILYLHMNSLRVEDTAVYYCSRDPRNKGLDPWGQGTLVTVSS

SEQ ID NO: 26523 - protein, 94 aa, Homo sapiens
SGFTFRNFWMFWVRQVPGKGLEWVSRIDGGGGATDYADSVRGRFTTSRDNSRNILYLQMNSLTVEDTAVYYCSRDPRNKGLDPWGQGTLVTVSS

SEQ ID NO: 26524 - protein, 92 aa, Homo sapiens
TVSGDSISGNSYYWGWIRQPPGKGLEWIASLYNDGRTYYNPSLKSRVTISKDTSKTQFSLKLSSVTAADTAVYYCVKFAGYWGQGTLVIVSS

SEQ ID NO: 26525 - protein, 92 aa, Homo sapiens
TVSGDSISGNSYYWGWIRQPPGKGLEWIASLYNDGRTYYNPSLKSRVTISKDTSKTQFSLKLSSVTAADTAVYYCVKFAGYWGQGTLVTVSS

SEQ ID NO: 26526 - protein, 92 aa, Homo sapiens
TVSGDSINDKHYYWGWIRQPPGKGLEWIAGLYYDGRIYYSPSLKSRVTISKDTSKTQFSLNLSSATAADTAVYYCVKFAGYWGQGTLVTVSS

SEQ ID NO: 26527 - protein, 92 aa, Homo sapiens
TVSGDSISGNYYYWGWIRQPPGKGLEWIASLYNDGRTYYNPSLKSRVTISKDTSKTQFSLKLSSVTAADTAVYYCVKFAGYWGQGTLVTVSS

SEQ ID NO: 26528 - protein, 92 aa, Homo sapiens
TVSGDSSNDKHYYWGWIRQPPGKGLEWIAGLYYDGRIYYSPSLKSRVTISKDTSKTQFSLNLSSVTAADTAVYYCVKFAGYWGQGTLVTVSS

SEQ ID NO: 26529 - protein, 92 aa, Homo sapiens
TVSGDSANSGSYYWGWIRQPPGKGLEWIGSLYGTGNRYFNPSLKSRVTISMDTSKTQFSLKLTSVTAADTAIYYCVKFAGYWGQGILVTVSS

SEQ ID NO: 26530 - protein, 92 aa, Homo sapiens
TVSGDFISGNSYYWGWIRQPPGKGLEWIASLYHDGRTYYNPSLKSRATISKDTSKTQFSLKLSSVTAADTAVYFCVKFAGYWGQGTLVTVSS

SEQ ID NO: 26531 - protein, 92 aa, Homo sapiens
TVSGDSISGYSYYWGWIRQPPGKGLEWIASLYNDGRTYYNPSLRSRVTISKDASKTQFSLKLGSVTAADTAVYYCVKFAGYWGQGILVTVSS

SEQ ID NO: 26532 - protein, 92 aa, Homo sapiens
TVSGDSISGNSYYWGWIRQPPGKGLEWIVGLYNDGTTYYNPSLKSRVTISKDTSKTQFSLKLGSVTAADTAVYYCVKFAGYWGQGILVTVSS

SEQ ID NO: 26533 - protein, 92 aa, Homo sapiens
TVSGDSISGNSYYWGWIRQPPGKGLEWIASLYNDGRTYYNPSLKSRVTISKDTSKTQFSLKLGSVTAADTAVYYCVKFAGYWGQGILVTVSS

SEQ ID NO: 26534 - protein, 92 aa, Homo sapiens
TVSGDSISGNSYYWGWIRQPPGKGLEWIAGLYNDGTTYYNPSLKSRVTISKDTSKSQFSLKLGSVTAADTAVYYCVKFAGYWGQGILVTVSS

SEQ ID NO: 26535 - protein, 92 aa, Homo sapiens
TVSGDSISGNSYYWGWIRQPPGKGLEWIASLYNDGRTYYNPSLKSRVTISKDTSKTQFSLKLSSVTAADTAVYYCVKFAGYWGQGTLVTLSS

SEQ ID NO: 26536 - protein, 96 aa, Homo sapiens
TVSGGSIRTGGYFWSWLRLRPGKGLEWIGYIHYSGSAYYNPSLRSRLSISVDTSNNEFSLYVTSVTAADTAVYYCAREGGYNNGLDVWGQGTTVTV

SEQ ID NO: 26537 - protein, 98 aa, Homo sapiens
SVSGGTISRGGYYWTWVRQVPGKGLEWIGYIYYRGTTYYNPSLRSRLTMSIETSKNQFSLKMTSVTGADTAVYYCAREGGYNNGLDVWGPGTTVTVSS

SEQ ID NO: 26538 - protein, 95 aa, Homo sapiens
SVSGGSTNIVNSYWNWMRQPAGEGLEWIGFIAPDGKTRYNPSLESRVIIAVDTSRKQLSLNLTSVTAADTAVYYCARGQLVFDSWGQGTQVTVSS

SEQ ID NO: 26539 - protein, 95 aa, Homo sapiens
SVSGGSTSSAQSYWNWIRQPAGEGLEWIGFIAPDGKTRYNPSLESRVLISVDTSKRQLSLNLTSVTAADTTVYYCARGQLVFDSWGQGTLVTVSS

SEQ ID NO: 26540 - protein, 94 aa, Homo sapiens
VSGGSTNIVNSYWNWMRQPAGEGLEWIGFIAPDGKTRYNPSLESRVIIAVDTSRKQLSLNLTSVTAADTAVYYCARGQLVFDSWGQGTQVTVSS

SEQ ID NO: 26541 - protein, 94 aa, Homo sapiens
VSGGSLSGSNPYWSWLRQAAGQTLEWIGRISASGSDNYGPSFKSRVSMSIDTAKNEFSLRLNSVTAADTAVYYCARGQLVFDSWGQGAQVIVSS

SEQ ID NO: 26542 - protein, 102 aa, Homo sapiens
VVSGFTFSDYWMSWVRQAPGKGLEWVANIKKDGSEKYYVDSVKGRFTIFRDNAKNSLYLQMNSLRAEDTAVYYCARGGKFYYDTSGYPEDFWGQGSLVTVSS

SEQ ID NO: 26543 - protein, 101 aa, Homo sapiens
VSGFTFSDYWMSWVRQAPGKGLEWVANIKKDGSERYYVDSVKGRFTIFRDNAKNSLYLEMNTLRAEDTAVYYCARGGKFYYDTSGYPEDFWGQGSLVTVSS

SEQ ID NO: 26544 - protein, 102 aa, Homo sapiens
VVSGFTFSDYWMSWVRQAPGKGLEWVANIKKDGSEKYYVDSVKGRFTIFRDNAKNSLYLEMNSLRAEDTAVYYCARGGKFYYDTSGYPEDFWGQGSLVTVSS

SEQ ID NO: 26545 - protein, 102 aa, Homo sapiens
AASGFTFSSYWMSWVRQAPGKGLDWVANIKQDGSEKYYVESLKGRFTISRDNAKNSLYLQMNSLRAEDTAVYYCARGGKFYYDTSGYPEDFWGQGTLVTVSS

SEQ ID NO: 26546 - protein, 102 aa, Homo sapiens; identical to SEQ ID NO: 26545

SEQ ID NO: 26547 - protein, 102 aa, Homo sapiens
AASGFSFSSYWMSWVRQAPGKGLDWVANIKQDGSEKYYVDSVKGRFTISRDNAKNSLYLQMNSLRAEDTAVYYCARGGKFYYDTSGYPEDFWGQGTLVTVSS

SEQ ID NO: 26548 - protein, 102 aa, Homo sapiens
AASGFTFTDYWMSWVRQAPGKGLDWVANIKQDGSEKYYVDSVKGRFTISRDNAKNSLYLQMNSLRAEDTAVYYCARGGKFYYDTSGYPEDFWGQGTLVTVSS

SEQ ID NO: 26549 - protein, 102 aa, Homo sapiens
AASGFTFTDYWMSWVRQAPEKGLDWVANIKQDGSEKYYVDSVKGRFTISRDNAKNSLYLQMNSLRAEDTAVYYCARGGKFYYDTSGYPEDFWGQGTLVTVSS

SEQ ID NO: 26550 - protein, 102 aa, Homo sapiens
AASGFTFSNYWMSWVRQAPGKGLDWVANINQDGSEKYYVDSVKGRFTISRDNAKNSLYLQMNSLRAEDTAVYYCARGGKFYYDTSGYPEDFWGQGTLVTVSS

SEQ ID NO: 26551 - protein, 102 aa, Homo sapiens
VVTGFTFSDYWMSWVRQAPGKGLEWVANIKKDGSEKYYVDSVKGRFTIFRDNAKNSLYLEMNSLRAEDTAVYYCARGGKFYYDTSGYPEDFWGQGSLVTVSS

SEQ ID NO: 26552 - protein, 97 aa, Homo sapiens
AASGFTFSNVWMNWVRQAPGKGLEWLGRIKTRREGAPTEYIAPVKGRFTISRDDSKNMLFLQMDSLKTDDTAVYYCTSRITTTNDYWGQGTLVTVSS

SEQ ID NO: 26553 - protein, 97 aa, Homo sapiens
AASGFSFSNVWMNWVRQAPGKGLEWVGRIKTKAEGVTTEYIAPVEGRFTISRDDSKNTLFLQMNNLKTDDTAVYYCTSRITTTNDYWGQGTLVTVSS

SEQ ID NO: 26554 - protein, 97 aa, Homo sapiens
AASGFTFSNVWMNWVRQAPGKGLEWLGRIKTKAEGVTTDYIAPVKGRFTISRDDSRNMVFLQMNGLKTDDTAVYYCTSRITTTNDYWGQGTLVTVSS

SEQ ID NO: 26555 - protein, 96 aa, Homo sapiens
ASGFSFSNVWMNWVRQIPGKGLEWVGRIMTHSEDETTQYIAPVKGRFTISRDDSRNTLYLQMNDLRMEDTALYYCTSRITTTNDYWGQGTLVTVSS

SEQ ID NO: 26556 - protein, 97 aa, Homo sapiens
AASGFNFDNVWMNWVRQIPGKGLQWVGRIMTKREGEKTEFIEPVRGRFVISRDDSKNTLYLQMTNLRIEDTALYYCTSRITTTNDYWGQGTLVTVSS

SEQ ID NO: 26557 - protein, 97 aa, Homo sapiens
AASGFTFNKAWMNWVRQAPGKGLEWLGRVKTQPEGATTEFAPPVKGRFTISRDDSRNMVFLRMNSLSFEDTAVYYCTSRITTTNDYWGQGTLVTVSS

SEQ ID NO: 26558 - protein, 97 aa, Homo sapiens
AASGFTFSNAWMNWVRQAPGKGLEWLGRVKTKAEGVATDYIAPVKGRFTISRDDSRNMVFLHMNGLKTDDTAVYYCTSRITTTNDYWGQGTLVTVSS

SEQ ID NO: 26559 - protein, 97 aa, Homo sapiens
AASGFSFSNVWMNWVRQAPGKGLEWLGRIKTKAEGVPTEYIAPVKGRFTISRDDSKKTLYLQMDSLKTDDTAVYYCTSRITTTNDYWGQGTLVTVSS

SEQ ID NO: 26560 - protein, 97 aa, Homo sapiens
AASGFTFSNVWMNWVRQAPGKGLEWVGRIKTKPEGVPTEYIAPVKGRFTISRDDSKNTLFLQMDSLKTDDTAVYYCTSRITTTNDYWGQGTLVTVSS

SEQ ID NO: 26561 - protein, 93 aa, Homo sapiens
AVSGYIVKTSYMSWVRQAPGKGLEWVSVIYAGGSTYYADSVKGRFTISRDDSRNTVDLQMNGLTAEDTAVYYCARGGGLPPGEWGQGTLVTVS

SEQ ID NO: 26562 - protein, 94 aa, Homo sapiens
AASGVTVSTSYMSWVRQAPGSGLEWVSVIYPGGNTYYADSVKGRFTISRDNSKNTLYLQMNSLRAEDTAVYYCARGGGLPPGEWGQGALVTVSS

SEQ ID NO: 26563 - protein, 98 aa, Homo sapiens
AASEFTFSTNWMTWVRQVPGKALARVATINQDGSVKYYLDSVEGRFTISRDNAEKSLYLQMNSLRVDDTAVYYCARGGRDSSWYWRDWGQGTLVTVSS

SEQ ID NO: 26564 - protein, 98 aa, Homo sapiens
AASGFTFSTNWMTWVRQVPGKTLARVATIDQNGSEEYYLDSVKGRFSISRDNAENSLHLQMNSLRVDDTAVYFCARGGRDSSWYWRDWGQGTLVTVSS

SEQ ID NO: 26565 - protein, 98 aa, Homo sapiens
AASGFTFSRNWMTWVRQAPGKGLEWVANIKEDGSEQYYVESVKGRFTISRDNAKSSLHVQMNSLRVEDTAVYYCARGGRDSSWYWRDWGQGTLVTVSS

SEQ ID NO: 26566 - protein, 98 aa, Homo sapiens; identical to SEQ ID NO: 26565

SEQ ID NO: 26567 - protein, 98 aa, Homo sapiens
AASGFTFSTNWLTWVRQAPGKGLEWVANIKQDGREKYYVESVKGRFTISRDNAKNSLYLQMSGLRSEDTAIYYCARGGRDSSWYWRDWGQGTLVTVSS

SEQ ID NO: 26568 - protein, 98 aa, Homo sapiens
AASGFTFNRNWMTWVRQAPGKGLEWVANIKEDGSEQYYVESVKGRFTISRDNAKSSLHVQMNSLRVEDTAVYYCARGGRDSSWYWRDWGQGTLVTVSS

SEQ ID NO: 26569 - protein, 98 aa, Homo sapiens
AASGITFSNFWMTWVRQAPGKGLEWVANIDQDGNAKYYVDSVKGRFTISRDNAKNSLYLQMNTLGAEDTAVYYCARGGRDSSWYWRDWGQGTLVTVSS

SEQ ID NO: 26570 - protein, 98 aa, Homo sapiens
AASGFTFSRNWMTWVRQAPGRGLEWVANIKEDGSEKYYVESVKGRFTISRDNAKNSLDVQMNSLRAEDTAVYYCARGGRDSSWYWRDWGQGALVTVSS

SEQ ID NO: 26571 - protein, 98 aa, Homo sapiens
AASGFTFSRNWMTWVRQAPGKGLEWVANIKEDGSEKYYVESVKGRFTISRDNAKNSLYVQMDSLRVEDTAVYYCARGGRDSSWYWRDWGQGTQVSVSS

SEQ ID NO: 26572 - protein, 98 aa, Homo sapiens
AASGFTFSRNWMTWVRQAPGKGLEWVANIKEDGSEQYYVESVKGRFTISRDNAKSSLHVQMNSLRVEDTAVYYCARGGRDSSWYWRDWGRGTLVTVSS

SEQ ID NO: 26573 - protein, 98 aa, Homo sapiens; identical to SEQ ID NO: 26570

SEQ ID NO: 26574 - protein, 97 aa, Homo sapiens
ASGFTFSRNWMTWVRQAPGKGLEWVANIKEDGSEQYYVESVKGRFTISRDNAKSSLHVQMNSLRVEDTAVYYCARGGRDSSWYWRDWGQGTLVTVSS

SEQ ID NO: 26575 - protein, 98 aa, Homo sapiens; identical to SEQ ID NO: 26565

SEQ ID NO: 26576 - protein, 97 aa, Homo sapiens
AASGFTFSNAWMTWVRQAPGKGLEWVGRIKSKTDGGTREYAAPVKGRFTISRDDSKNTLYLQMNSLKIEDTAVYYCIIGPKHYGMDVWGQGTTVTVS

SEQ ID NO: 26577 - protein, 98 aa, Homo sapiens
AVSGFTFSNAWMTWVRQAPGKGLEWVGRIKSKTDGGTRDYAAPVKGRFTISRDDSKNTLYLQMNSLKIEDTAVYYCIIGPKHYGMDVWGQGTTVTVSS

SEQ ID NO: 26578 - protein, 97 aa, Homo sapiens; identical to SEQ ID NO: 26576

SEQ ID NO: 26579 - protein, 98 aa, Homo sapiens
AASGFTFKTAWMTWVRQAPGKGLEWVGRIKSKTDGGTTDHAAPVRGRFAISRDDSKNTLYLQMNSLKTEDTAVYYCIIGPKHYGMDVWGQGTTVTVSS

SEQ ID NO: 26580 - protein, 99 aa, Homo sapiens
AASGFTFSDSAIHWVRQASGKGLEWVGRIRNKTNSYATAYAASVKGRFTISRDDSENTAYLQMNSLKTEDTAVYYCTRRGVGATSPDYWGQGTLVTVSS

SEQ ID NO: 26581 - protein, 99 aa, Homo sapiens; identical to SEQ ID NO: 26580

SEQ ID NO: 26582 - protein, 99 aa, Homo sapiens
AASGFTFSGSAIHWVRQASGKGLEWVGRVRSKANNYATTYTASVKGRFTIFRDDSKNTAYLQMNSLKTEDAAVYYCTRRGVGATSPDYWGQGTLVTVSS

SEQ ID NO: 26583 - protein, 95 aa, Homo sapiens
VVYGGSFKNFYWTWIRQAPGKGLEWIGEIYHSGGTNYNPSLKSRVTISVDTSKNQFSLRVPSVTAADTAVYYCARGRWSPTFDIWGQGTLVTVSS

SEQ ID NO: 26584 - protein, 95 aa, Homo sapiens
AVYGGSFKNHYWTWIRQAPGKGLEWIGEIYHSGDTKYNPSLKSRVAISVDPSRNQFSLRMTSVTAADTAVYYCARGRWSPTFDIWGQGTLVTVSS

SEQ ID NO: 26585 - protein, 95 aa, Homo sapiens
AVYGVSFSGHYWSWIRQPPGKGLEWIGEINHSGNTNYNPSLRSRVIISVDTSKNQFSLKLTSVTAADTAVYYCARGRWSPTFDIWGQGTMVTVSS

SEQ ID NO: 26586 - protein, 95 aa, Homo sapiens
AVYGGSFKNHYWTWIRQAPGKGLEWIGEIYHSGDTKYNPSLKSRVAISVDTSRNQFSLRVTSVTAADTAVYYCARGRWSPTFDIWGQGTLVTVSS

SEQ ID NO: 26587 - protein, 94 aa, Homo sapiens
SGYTFSTYYLHWMRQAPGQGLEWMGMIDPGGGTTIYAQNFQGRVSMTRDTSITTAYMEMSDLKSDDTAIYYCVREFVGGHFDYWGQGTLVIVSS

SEQ ID NO: 26588 - protein, 94 aa, Homo sapiens
ASGYSFTTYYLHWMRQAPGQGLEWVGIINCGSGSTNYPQKFQGRVTITRDTSTSTVYMELRSLTSDDTAEYYCVREFVGGHFDYWGPGTLITVS

SEQ ID NO: 26589 - protein, 94 aa, Homo sapiens
SGYTFTNYLVHWMRQAPGQGLEWMGFVNTAGGDAHFVQKFQVRLTSTRDTSTSTVFMEITGLRPDDTAVYYCVREFVGGHFDYWGQGTLVTVSS

SEQ ID NO: 26590 - protein, 90 aa, Homo sapiens
GSGFTFSSYWMTWVRQAPGKGLQWVANINQDGTEKHYMASLRGRFTISRDNTRRFVYLDMSRLQAEDTALYYCAGNLMDVWGQGTMVTVS

SEQ ID NO: 26591 - protein, 91 aa, Homo sapiens
ASGFAFSNYWMTWVRQAPGKGLEWVANLNQDGREKHYSDSVKGRFTIGRDNIKNSLYLQMTSLRVEDTAVYYCAGNLMDVWGKGTMVIVSS

SEQ ID NO: 26592 - protein, 91 aa, Homo sapiens
ASGFNFNNYWMTWVRQAPGRGLEWLANINQQGTEVHYADSVKARFTISRDNTRNLLFLQMFSLRVDDTALYYCAGNLMDVWGTGTSVTVSS

SEQ ID NO: 26593 - protein, 90 aa, Homo sapiens
GSGFTFSSYWMTWVRQAPGKGLQWVANINQDGTEKHYMGSLRGRFTISRDNTRRFVYLEMSRLQAEDTAVYYCAGNLMDVWGQGTMVTVS

SEQ ID NO: 26594 - protein, 90 aa, Homo sapiens
GSGFTFSSYWMTWVRQAPGKGLQWVANINQDGTEKHYMDSLRGRFTISRDNTRRFVYLEMSRLQAEDTAVYYCAGNLMDVWGQGTMVTVS

SEQ ID NO: 26595 - protein, 95 aa, Homo sapiens
AASGFTASSSYVNWVRQAPGKGLEWVSIIYSNGNTYYTSSVKGRFTISRHNSRNTVYLQMNSLRREDTAVYFCGRGDFYYGVDVWGHGTTVTVSS

SEQ ID NO: 26596 - protein, 95 aa, Homo sapiens
AASGFTVSSTYMNWVRQAPGRGLEWVSIIYSNGRTYYADSVKGRFTISRDSSKNTLYLQMNSLRVEDTAVYYCGRGDFYYGVDVWGQGTTVSVSS

SEQ ID NO: 26597 - protein, 99 aa, Homo sapiens
ATSGFAFSHHAVHWVRQAPGKGLQWVSQIWSDGSKKNYADSVKGRFIISRDSSKNTVYLEMNSLRVEDTAVYYCARDGQQATPYAMDVWGQGTMVTVSS

SEQ ID NO: 26598 - protein, 99 aa, Homo sapiens
AVSGFTLRSHGMHWVRQAPGKGLEWLAQIWSDGSNKYYADSVRGRFTISRDDSKDTLYLQLNSLRAEDTAVYYCARDGQQATPYAMDVWGQGTTITVSS

SEQ ID NO: 26599 - protein, 98 aa, Homo sapiens
TVSGGSISSASSYWSWIRQPAGKGLEWIGRIHMSGGTKYNASLESRVIISIDTSKNQFSLKLSSVTAADTAVYYCARDAGASGPEDYWGQGTLVTVSS

SEQ ID NO: 26600 - protein, 98 aa, Homo sapiens
TVSGGSVKTATSYWSWVRQPAGKGLEWIGRIHMSGETNYNASLESRVLISIDTSKNQFSLKLTSVTAADTAVYYCARDAGASGPEDYWGQGTLVTVSS

SEQ ID NO: 26601 - protein, 98 aa, Homo sapiens
TVSGGSISSDSFYWAWIRQPPGKGLEWIGRIHVSGGTDYNASLRGRVTISVDTSKNQFSLNLNFVTAADTAVYYCARDAGASGPEDYWGQGTLVTVSS

SEQ ID NO: 26602 - protein, 98 aa, Homo sapiens
TVSGGSISSDSFYWAWIRQPPGKGLEWIGRIHVSGGTDYNASLRGRVTISVDTSKNQFSLNLNLVTAADTAVYYCARDAGASGPEDYWGQGTLVTVSS

SEQ ID NO: 26603 - protein, 98 aa, Homo sapiens
TVSGGSISSDSFYWAWIRQPPGKGLEWIGRTHVSGGTDYNASLRGRVTISVDTSKNQFSLNLNFVTAADTAVYYCARDAGASGPEDYWGQGTLVTVSS

SEQ ID NO: 26604 - protein, 96 aa, Homo sapiens
AASGFSFSDTWMSWVRQAPGKGLEWVGRIKRKTDGGTTDYAAPMKGRFTISRDDSKNTLYLQMNSLKTEDTALYHCASGGHYFGSWGQGALVTVSS

SEQ ID NO: 26605 - protein, 95 aa, Homo sapiens
GSGFSLSNAWMSWVRQAPGKGLEWVGRIKSKTDGATTDYTPPVNGRFTISRDDSRNTLYLQMNSLNTEDTAVYYCASGGHYFGSWGQGTLVSVSS

SEQ ID NO: 26606 - protein, 96 aa, Homo sapiens
ASGYTFTGYYMHWVRQAPGQGLEWMGWINPNSGGTNCTQKFQGRVSMTRDTSISTAYMELRRLRYDDTAVYYCAREGAVAGDFDYWGQGTLVTVSS

SEQ ID NO: 26607 - protein, 96 aa, Homo sapiens
ASGYTFTGYYMHWVRQAPGQGLEWMGWINPNTGDTNYAQRFQGRVTMTRDTSISTAYMELRRLKSDDTAVYYCAREGAVAGDFDYWGQGTLVTVSS

SEQ ID NO: 26608 - protein, 95 aa, Homo sapiens
SGYTFTTFDINWMRQAPGQGFEWLGWMNPNNGHTGYAQKFQGRVSMTRDTSKSTAYMELRNLRSEDTAVYYCARNPAFTGDFDPWGQGTLLTVSS

SEQ ID NO: 26609 - protein, 95 aa, Homo sapiens
SGYTFTTFDINWMRQAPGQGFEWLGWMNPQNGHTGYAQRFQGRLSMTRDTSKSTAYMELRNLRSDDTAVYYCARNPAFTGDFDPWGQGTLLTVSS

SEQ ID NO: 26610 - protein, 95 aa, Homo sapiens
SGYIFTTFDINWMRQAPGQGFEWLGWMNPQNGHTGYAQRFQGRLSMTRDTSKSTAYMELRNVRSDDTAVYYCARNPAFTGDFDPWGQGTLLTVSS

SEQ ID NO: 26611 - protein, 96 aa, Homo sapiens
ASGYTFTNYDINWVRQATGQGLEWLGWMNPNSGKTGYAQRFQGRVTMTRDTSISTAYMELSSLRSEDTAVYYCARNPAFTGDFDPWGQGTLVTVSS

SEQ ID NO: 26612 - protein, 100 aa, Homo sapiens
AASGFIVSSNYMTWVRQAPGKGLEWVSTVYSGGTTSYADSVRGRFIISRDNSKNTLYLQMNSLRAEDTAVYYCARDFGDDTTGYYGMDVWGQGTTVTVSS

SEQ ID NO: 26613 - protein, 100 aa, Homo sapiens
AASGFTVSSNYMSWVRQAPGKGLEWVSTVYSGGTTAYADSMRGRFIISRDNSKNTLYLQMNSLRAEDTAVYYCARDFGDDTTGYYGMDVWGQGTTVTVSS

SEQ ID NO: 26614 - protein, 100 aa, Homo sapiens
AASGFTVSSNYMSWVRQAPGKGLEWVSTIHSGGSRFHADSVKGRFTISRDNSKNTLYLQMNSLRVEDTAVYYCARDFGDDTTGYYGMDVWGQGTTVTVSS

SEQ ID NO: 26615 - protein, 94 aa, Homo sapiens
AASEFTVNTDFMTWVRQAPGQGLEWVSVMYAGGETYYADSVKGRFTVSRDSSTNILYLQIDSLRGEDTAVYYCARDPFQPWGHWGQGTLVTVSS

SEQ ID NO: 26616 - protein, 94 aa, Homo sapiens; identical to SEQ ID NO: 26615

SEQ ID NO: 26617 - protein, 94 aa, Homo sapiens
AAFEFIVSDNYMSWVRQAPGKGLEWLSVIYKNGDTHYADSVKGRFTVSRDNSKNTLYLQINSLRGEDTAVYYCARDPFQPWGHWGQGILVTVSS

SEQ ID NO: 26618 - protein, 95 aa, Homo sapiens
SGFTVSTNFMTWVRQAPGKGLRWLSTIYSAAAGGSTYHADSVKGRFTISRDSSKNTLYLQIDSLRTDDTAVYYCARDPFQPWGHWGRGTLVTVSS

SEQ ID NO: 26619 - protein, 97 aa, Homo sapiens
ASGFALSSSAVSWVRQAPGKGLEWVSALSGSAVDTFYADSVKGRFTISRVNAKNTLYLQMNSLRAEDTAVYYCAKAYSSSWYYFDFWGQGTLVTVSS

SEQ ID NO: 26620 - protein, 98 aa, Homo sapiens
AASGFAFSSYPMSWVRQAPGKGLEWVSIFYNGADNTYYADSVKGRFTISRDNSKNTLYLQMNSLRADDTAIYYCAKAYSSSWYYFDFWGQGTLVTVSS

SEQ ID NO: 26621 - protein, 98 aa, Homo sapiens
AASGFAFSSYPMSWVRQAPGKGLEWVSIFYDGADNTYYADSVKGRFTISRDNSKNTLYLQMDSLRADDTAIYYCAKAYSSSWYYFDFWGQGTLVTVSS

SEQ ID NO: 26622 - protein, 95 aa, Homo sapiens
AASEFSISDYWMHWVRQAPGKGLLWVSHISNDGRSVNYVDSVRGRFTISRDNAKNTVYVQMNSLRAEDTAVYYCARGTDRAMDVWGHGTAVTVSS

SEQ ID NO: 26623 - protein, 95 aa, Homo sapiens
AASEFSISDYWMHWVRQAPGKGLLWVSHISNDGRSVNYADSVRGRFTISRDNAKNTVYVQMNSLRAEDTAVYYCARGTDRAMDVWGHGTAVTVSS

SEQ ID NO: 26624 - protein, 95 aa, Homo sapiens
GASGFTLSGYWMHWVRQTPGKGLVWVSHISSDGSIINYADSVNGRFTISRDNAKNTVHLHMNSLRVEDTAVYYCARGTDRAMDVWGQGTTVTVSS

SEQ ID NO: 26625 - protein, 95 aa, Homo sapiens
GASGFTLSGYWMHWVRQTPGKGLVWVSHISSDGSIINYADSVNGRFTISRDNAKNTVHLHMNSLRVEGTAVYYCARGTDRAMDVWGQGTTVTVSS

SEQ ID NO: 26626 - protein, 95 aa, Homo sapiens
GASGFTLSGYWMHWVRQTPGKGLVWVSHISSDGSIINYADSLNGRFTISRDNAKNTVHLHMNSLRVEDTAVYYCARGTDRAMDVWGQGTTVTVSS

SEQ ID NO: 26627 - protein, 95 aa, Homo sapiens
GASEFSLRTYWMDWVRQTPGKGLEWVSHINSEGSIINYADSVRGRFTISRDNAKNTVHLQMSSLRVEDTAVYYCARGTDRAMDVWGQGTTVTVSS

SEQ ID NO: 26628 - protein, 95 aa, Homo sapiens
GATGFTLSGYWMHWVRQTPGKGLVWVSHISSDGSIINYADSVNGRFTISRDNAKNTVHLHMNSLRVEDTAVYYCARGTDRAMDVWGQGTTVTVSS

SEQ ID NO: 26629 - protein, 95 aa, Homo sapiens; identical to SEQ ID NO: 26624

SEQ ID NO: 26630 - protein, 95 aa, Homo sapiens
GASGFTLSGYWMHWVRQTPGKGLVWVPHISSDGSIINYADSVNGRFTISRDNAKNTVHLHMNSLRVEDTAVYYCARGTDRAMDVWGQGTTVTVSS

SEQ ID NO: 26631 - protein, 106 aa, Homo sapiens
TQTLTLTCTFSGFSLSTNGVAVGWIRQPPGKALEWLTLIYWDDDKRYNPSLKSRLTITKDSSKSQVVLTMTNMDPVDTATYYCGRRLAAAGLFDYWGQGTLVTVSS

SEQ ID NO: 26632 - protein, 106 aa, Homo sapiens
TQTLTLTCTFSGFSLSTSGMAVGWIRQPPGKALEWLALVYWNDDKRYRPSLRSRLTITKDTSKNQVVLTMTNMDPVDTATYYCGRRLAAAGLFDYWGQGTLVTVSS

SEQ ID NO: 26633 - protein, 98 aa, Homo sapiens
VSTGSFSNNDYYWSWIRQPAGKGLEWIGRIFSSGSANYNPSLKSRVTMSVNTSKNQFSLRLSPVTAADTAVYYCARAGYGDYVGYFDYWGQGIMVTVS

SEQ ID NO: 26634 - protein, 101 aa, Homo sapiens
TVSGDSISGSGSYYWSWIRQPAGKGLEWIGRIYTSGSTNYNPSLKGRVTISVDTSKNQFSLKLRSVNAADTAVYYCARAGYGDYVGYFDYWGQGTLVTVSS

SEQ ID NO: 26635 - protein, 94 aa, Homo sapiens
TVSGWPITGYFWTWIRQSPGKGLEWIGYISYSGDTNYNPSFKSRVTMSVDTAKSQFSLKLSSVTAADTAVYYCAREFRSSPDYWGQGTLVTVSS

SEQ ID NO: 26636 - protein, 94 aa, Homo sapiens
TVSGLSISGYYWAWIRQPPGKGLEWIGVVSWSGDTNYNPSLQSRVTLSVDMSKSQFSLRLDSVTAADTAMYYCAREFRSSPDYWGQGTLVSVSS

SEQ ID NO: 26637 - protein, 100 aa, Homo sapiens
VASGLTFSTYWMAWVRQAPGQGLEWVANVRQDGGEKYYVDSVKGRFTISRDNAKNSLYLQMSSLRGDDTAVYYCARIMDYGDRHYGMDVWGQGTSVTVSS

SEQ ID NO: 26638 - protein, 100 aa, Homo sapiens
ATSGFSFSPYWMAWVRQAPGKGLQWVANINGDGGEKYYVDSVKGRFTISRDNAKNSLFLQMNSLRVEDTAVYYCARIMDYGDRHYGMDVWGQGTTVTVSS

SEQ ID NO: 26639 - protein, 99 aa, Homo sapiens
AASGFTFSSYGMHWVRQAPGKGLEWVAVIWYDGSNKYYADSVKGRFTISRDNSKNTLYLQMNSLRAEDTAVYYCAREYCSGGSCHLDYWGQGTLVTVSS

SEQ ID NO: 26640 - protein, 99 aa, Homo sapiens
AASGFTFSNYGINWVRQAPGKGLEWVAVIWYDGTNKYYADSVKGRFTISRDNSKNTLYLQMNSLRAEDTAVYYCAREYCSGGSCHLDYWGQGTLVTVSS

SEQ ID NO: 26641 - protein, 91 aa, Homo sapiens
AASGFTVSNYGMNWFRQAPGKGLEWVSSISSSGHTYYVDSVKGRFTVSRDNAKNSLFLQMNSLRAEDTSVYYCARDGFDIWGQGTVVTVSS

SEQ ID NO: 26642 - protein, 91 aa, Homo sapiens
AASGFSITAYGMNWVRQVPGKGLEWVSSISSTYSVYYADSVRGRSTISRDNAKNSLYLQVNSLRAEDTALYYCARDGFDIWGLGTMVTVSS

SEQ ID NO: 26643 - protein, 103 aa, Homo sapiens
TVSGASLRSYYWTWIRQPAGKGLEWIGRIYNSGSTKYNPSLRSRVTISADTSNNQFSLTVISVTAADTAVYYCARYGCTGGVCHSDYFGMDVWGPGTTVTVSS

SEQ ID NO: 26644 - protein, 103 aa, Homo sapiens
TVSGGSISTYHWSWIRQPAGKGLEWIGRIYNSGSTKYNPSLKSRVTMSLDTSKNQFSLKLSPVTAADTAVYYCARYGCTGGVCHSDYFGMDVWGQGTTVTVSS

SEQ ID NO: 26645 - protein, 103 aa, Homo sapiens
TVSGASLSSYYWTWIRQPAGKGLEWIGRIYNTGSTRYNPSLRSRVTISADTSNNQFSLTVISVTAADTAVYYCARYGCTGGVCHSDYFGMDVWGPGTTVTVSS

SEQ ID NO: 26646 - protein, 94 aa, Homo sapiens
AASGFTFSVYAMSWVRQAPGKGLEWVSGIIGSGATTYYADSVKGRFTISRDNSKNTLYLQMNSLRDEDTAVYYCVRSPRLSDYWGQGTLVTVSS

SEQ ID NO: 26647 - protein, 94 aa, Homo sapiens; identical to SEQ ID NO: 26646

SEQ ID NO: 26648 - protein, 95 aa, Homo sapiens
AASGFTFISYDMSWVRQAPGKGLEWVAGIATGDGGSTFYADSVKGRFTISRDNDKNILYLQMKSLRAEDTAIYYCVRSPRLSDYWGQGTRVTVSS

SEQ ID NO: 26649 - protein, 103 aa, Homo sapiens
VVSGFTFSNAWMTWVRQVPGKGLEWVGRIKTRSDGGILDYIAPVKGRFTISRDDSKNTLYLQMKSLKTEDTGIYYCTKEVGATGLYYYGMDVWGQGTTVTVSS

SEQ ID NO: 26650 - protein, 102 aa, Homo sapiens
AASGFTFTNAWMSWVRQAPGKGLEWVGRIKSTAEGGILDYTASMKGRFTISRDDSKTTLYLQMNSLEIEDTAVYYCTKEVGATGLYYYGMDVWGQGATVTVS

SEQ ID NO: 26651 - protein, 102 aa, Homo sapiens; identical to SEQ ID NO: 26650

SEQ ID NO: 26652 - protein, 102 aa, Homo sapiens
AASGFTFTNAWMSWVRQAPGKGLEWVGRIKSTAEGGILDYTASMKGRFTISRDGSKTTLYLQMNSLEIEDTAVYYCTKEVGATGLYYYGMDVWGQGATVTVS

SEQ ID NO: 26653 - protein, 102 aa, Homo sapiens
AASGFTFNNAWMSWVRQAPGKGLEWVGRIKSTAEGGTLDYTASMKGRFTISRDDSKTTLYLQMNSLETEDTAVYYCTKEVGATGLYYYGMDVWGQGATVTVS

SEQ ID NO: 26654 - protein, 100 aa, Homo sapiens
SVSGGSISAANYYWGWFRQPPEKGLEWLGTLSYSGSAYYNPSLKSRVTISVATSENQFSLNLNSVTAGDTALYYCARIYGDTPPWYFDLWGRGTLVTVSS

SEQ ID NO: 26655 - protein, 100 aa, Homo sapiens
TVSGDSISSSTYYWGWIRQPPGKGLEWIGTIYYSGSAYYSPSLTSRVTITIDTSKNQFSLKLTSVTAADMAVYYCARIYGDTPPWYFDLWGRGTLVTVSS

SEQ ID NO: 26656 - protein, 102 aa, Homo sapiens
TVSGGPISSYYWSWIRQPPGKGLEWIGYIYYSGSTNYNPSLKSRVTISVDTSKNQFSLKLSSVTAADTAVYYCARDRYCSGGSCFDWYFDLWGRGTLVTVSS

SEQ ID NO: 26657 - protein, 102 aa, Homo sapiens
TVSGGSISGYYWSWIRQPPGKGLEWIGFVYDSGRTHYNPSLKSRVTISVDTSTNQFSLKLTSVSAADTAVYYCARDRYCSGGSCFDWYFDLWGRGTLVTVSS

SEQ ID NO: 26658 - protein, 102 aa, Homo sapiens
TVSGGSISGYYWSWVRQSPGEGLEWIGFIHYSGRTHYNPSLKSRVIISADMPNNQFSLKLTSVTAADTGVYYCARDRYCSGGSCFDWYFDLWGRGTLVTVSS

SEQ ID NO: 26659 - protein, 102 aa, Homo sapiens
TVSGGSISGYYWSWVRQSPGKGLEWIGFIHYNGRTNYNPSLKSRVTMSVDMSKNQFSLKLTSVTAADTAVYYCARDRYCSGGSCFDWYFDLWGRGTLITVSS

SEQ ID NO: 26660 - protein, 102 aa, Homo sapiens
TVSGGSISGYYWSWIRQPPGKGLEWIGFVFDSGRTHYNPSLKSRVTISVDTSTNQFSLKLTSVSAADTAVYYCARDRYCSGGSCFDWYFDLWGRGTLVTVSS

SEQ ID NO: 26661 - protein, 102 aa, Homo sapiens
TVSGGPISSYSWSWIRQPPGKGLEWIGYIYDTDHTNYNPSLKSRVTISVDTSKNKFSLKLNSVTAADTAVYYCARDRYCSGGSCFDWYFDLWGRGTLVTVSS

SEQ ID NO: 26662 - protein, 102 aa, Homo sapiens
TVSGGSISGYSWSWIRQPPGQGLEWIGFIFHSGYINYNPSLKSRVTISVDTSKNQFSLKLSSVTAADTAVYYCARDRYCSGGSCFDWYFDLWGRGTLVTVSS

SEQ ID NO: 26663 - protein, 102 aa, Homo sapiens
TVSGGPISSYSWSWIRQPPGKGLEWIGYIYDADHTNYNPSLKSRVTISVDTSKNNFSLRLNSVTAADTAVYYCARDRYCSGGSCFDWYFDLWGRGTLVTVSS

SEQ ID NO: 26664 - protein, 102 aa, Homo sapiens; identical to SEQ ID NO: 26657

SEQ ID NO: 26665 - protein, 102 aa, Homo sapiens
TVSGGSISGYYWSWIRQPPGKGLEWIGFVYDSGRTNYNPSLKSRVTISVDTSNNQFSLKLTSVTAADTAVYYCARDRYCSGGSCFDWYFDLWGRGTLVTVSS

SEQ ID NO: 26666 - protein, 102 aa, Homo sapiens
TVSGGPISSYSWSWIRQPPGKGLEWIGYIYDTDHTNYNPSLKSRVTISIDTSKNKFSLKLNSVTAADTAVYYCARDRYCSGGSCFDWYFDLWGRGTLVTVSS

SEQ ID NO: 26667 - protein, 102 aa, Homo sapiens
TVSGGSISGYSWSWVRQSPGKGLEWIGYIYYSGITNYNPSLRSRVTMSVDTSNNRFSLKLTSVTAADTAVYYCARDRYCSGGSCFDWYFDLWGRGTLVTVSS

SEQ ID NO: 26668 - protein, 102 aa, Homo sapiens
TVSGGSISGYYWSWIRQPPGKGLEWIGFVYDSGRTNYNPSLKSRVTISVDKSKNQFSLKLTSVTAADTAVYYCARDRYCSGGSCFDWYFDLWGRGTLVTVSS

SEQ ID NO: 26669 - protein, 102 aa, Homo sapiens
TVSGGSISGYYWSWIRQPPGKGLEWIGFVFDSGRSNYNPSLESRATISVDTSANQFSLKLTSVTAADTAIYYCARDRYCSGGSCFDWYFDLWGRGTLVTVSS

SEQ ID NO: 26670 - protein, 102 aa, Homo sapiens
TVSGGSISGYYWSWIRQPPGKGLEWIGFVYDSGRSNYNPSLESRATISVDTSTNQFSLKLTSVTAADTAIYYCARDRYCSGGSCFDWYFDLWGRGTLVTVSS

SEQ ID NO: 26671 - protein, 102 aa, Homo sapiens
TVSGGSISGYYWSWVRQSPGKGLEWIGYIYYSGSTNYNPSLRSRVTISADTSNNQFSLKLTSVTAADTALYYCARDRYCSGGSCFDWYFDLWGRGTLVTVSS

SEQ ID NO: 26672 - protein, 102 aa, Homo sapiens
TVSGGPISSYSWSWIRQPPGKGLEWIGYIYDTDHTNYNPSLKSRVTISVDTSKSKFSLKLNSVTAADTAVYYCARDRYCSGGSCFDWYFDLWGRGTLVTVSS

SEQ ID NO: 26673 - protein, 102 aa, Homo sapiens; identical to SEQ ID NO: 26668

SEQ ID NO: 26674 - protein, 102 aa, Homo sapiens
TVTGGSISGYYWSWVRQSPGKGLEWIGFIYYSGRTNYNPSLKSRVTISADTSNNQFSLKLTSVTAADTAVYYCARDRYCSGGSCFDWYFDLWGRGTLVTVSS

SEQ ID NO: 26675 - protein, 102 aa, Homo sapiens
TVSGGSISGYSWSWIRQPPGQGLEWIGYIFHSGYTNYNPSFKSRVTMSVDTSTNQFSLKLSSVTAADTAVYYCARDRYCSGGSCFDWYFDLWGRGTLVTVSS

SEQ ID NO: 26676 - protein, 102 aa, Homo sapiens; identical to SEQ ID NO: 26667

SEQ ID NO: 26677 - protein, 102 aa, Homo sapiens
TVSGGSISGYYWSWVRQSPGKGLEWIGYIYYSGNTNYNPSLKSRVTISADTSNNQFSLKLTSVTAADSAVYYCARDRYCSGGSCFDWYFDLWGRGTLVTVSS

SEQ ID NO: 26678 - protein, 102 aa, Homo sapiens
TVSGGPISSFSWSWIRQPPGKGLEWIGYVYHSGYTNYNPSLKSRVTISIDTSKNQFSLKLSSVTAADTAVYYCARDRYCSGGSCFDWYFDLWGRGTLVTVSS

SEQ ID NO: 26679 - protein, 102 aa, Homo sapiens
TVSGGSISSYYWSWIRQSPGKGLEWIGFVYDNGRTNYNPSLKSRVTILVDTSENQFSLKLRSVTAADTAVYYCARDRYCSGGSCFDWYFDLWGRGTLVTVSS

SEQ ID NO: 26680 - protein, 102 aa, Homo sapiens; identical to SEQ ID NO: 26675

SEQ ID NO: 26681 - protein, 102 aa, Homo sapiens; identical to SEQ ID NO: 26661

SEQ ID NO: 26682 - protein, 102 aa, Homo sapiens; identical to SEQ ID NO: 26666

SEQ ID NO: 26683 - protein, 102 aa, Homo sapiens; identical to SEQ ID NO: 26666

SEQ ID NO: 26684 - protein, 102 aa, Homo sapiens; identical to SEQ ID NO: 26667

SEQ ID NO: 26685 - protein, 102 aa, Homo sapiens
TVSGGSISGYYWSWVRQSPGKGLEWIGFIHYNGRTNYNPSLKSRVTISVDMSNNQFSLKLTSVTAADTAFYYCARDRYCSGGSCFDWYFDLWGRGTLVTVSS

SEQ ID NO: 26686 - protein, 102 aa, Homo sapiens; identical to SEQ ID NO: 26661

SEQ ID NO: 26687 - protein, 102 aa, Homo sapiens
TVSGGPISSYSWSWIRQSPGKGLEWIGYIYDTDHTNYNPSLKSRVTISVDTSKNKFSLKLNSVTAADTAVYYCARDRYCSGGSCFDWYFDLWGRGTLVTVSS

SEQ ID NO: 26688 - protein, 102 aa, Homo sapiens
TVSGGPISSYSWSWIRQPPGKGLEWIGYIYDTDHTNYNPSLKSRVSISVDTSKNKFSLKLNSVTAADTAVYYCARDRYCSGGSCFDWYFDLWGRGTLVTVSS

SEQ ID NO: 26689 - protein, 102 aa, Homo sapiens
TVSGGSISGYYWSWIRQAPGKGLEWIGFIFYSGRTHYNPSLKSRVTISVDTSNNQFSLKLISVTAADAAVYYCARDRYCSGGSCFDWYFDLWGRGSLVTVSS

SEQ ID NO: 26690 - protein, 102 aa, Homo sapiens; identical to SEQ ID NO: 26657

SEQ ID NO: 26691 - protein, 102 aa, Homo sapiens; identical to SEQ ID NO: 26675

SEQ ID NO: 26692 - protein, 98 aa, Homo sapiens
AASGFTFSNYAMNWVRQAPGKGLEWVSAIGGRGDRTFYADSVKGRFTISRDNSKNTLYLQMNSLRADDTAVYYCAKDDYGDYFDAFEIWGQGTMVTVS

SEQ ID NO: 26693 - protein, 99 aa, Homo sapiens
AASGFTFSNYVMGWVRQAPGKGLEWVSSISGSGGTAFYADSVKGRFTISRDNSKNTLYLQMNSLRAEDTAVYYCAKDDYGDYFDAFEIWGQGTMVAVSS

SEQ ID NO: 26694 - protein, 99 aa, Homo sapiens
AASGFTFDDYAMHWVRQAPGKGLEWVSAISYNSGIVENADSVKGRFTVSRDNAKNSLYLQMNSLRAEDTALYYCVKDRYASGWGYFDYWGQGTLVTVSS

SEQ ID NO: 26695 - protein, 99 aa, Homo sapiens
AASGFTFHDKAMHWVRQAPGKGLEWVSGISYNSGFIAYADSVKGRFTISRDNAKNSLHLQMNSLRAEDTALYYCVKDRYASGWGYFDYWGQGTLVIVSS

SEQ ID NO: 26696 - protein, 100 aa, Homo sapiens
AASGFSFTSYGMHWVRQAPGKGLEWVAVIWYDGRNKNYADSVKGRFTVSRDTSKNTVYLQMNSLRAEDTAVYYCARDVDTSSHFGRFDPWGQGTLVTVSS

SEQ ID NO: 26697 - protein, 99 aa, Homo sapiens
AVSGFSLTSYGMHWVRQTPGKGLEWVAVIWYDGKKKNYADFVKGRFTISRDNSKNTVYLQMNSLRVEDTAVYYCARDVDTSSHFGRFDPWGQGTLVTVS

SEQ ID NO: 26698 - protein, 100 aa, Homo sapiens
AASGFTFSNYGFHWVRQAPGKGLEWVALIWYDGSNKYYADSVKGRFTISRDSSKNTVYLQMNSLRAEDTAVYSCARDVDTSSHFGRFDPWGQGTLVTVSS

SEQ ID NO: 26699 - protein, 98 aa, Homo sapiens
AASGFNFNNYWMSWVRQAPGKGLEWVANLKYDDTEGYYVDSVRGRFTISRDNAKNSLFLQMNSLRAEDTAMYYCAREATFTAYNFDYWGQGILVTVSS

SEQ ID NO: 26700 - protein, 97 aa, Homo sapiens
ASGFTFSNYWMAWVRQAPGKGLEWVANMKFDRSETHYLDSVKGRFTISRDNAKNSVVLQMNNLKADDTAVYYCAREATFTAYNFDYWGQGALVTVSS

SEQ ID NO: 26701 - protein, 103 aa, Homo sapiens
ETSGFTFNTAWMSWVRQASGKGLEWVGRIKPKNQGETRDYAASVRGRFSISRDDPKNMLFLQMNNLKTEDTAVYYCTTGGPLPHDSSWSFDFWGRGTLVTVSS

SEQ ID NO: 26702 - protein, 102 aa, Homo sapiens
AASGFTFTTAWMSWVRQAPGKGLEWVGRSIPKTAGGTTDYAAPVKGRFTISRDDSSDMLYLQMNSLSTEDTALYYCTTGGPLPHDSSWSFDFWGRGTLVTVS

SEQ ID NO: 26703 - protein, 98 aa, Homo sapiens
AASGFTASDGWMSWVRQAPGKGLEWVGRMKSKAHGGTIDYAAPVKGRFTISRHDSENTLYLQMNSLKTEDTAVYYCTTGSGLYSPDYWGQGTLVTVSS

SEQ ID NO: 26704 - protein, 98 aa, Homo sapiens
AASGFTFSNAWMNWVRQAPGKGLEWVGRIKTRTDGGTTDYVAPVKGRFTISRDDSKNTLYLQMNSLKSEDTAVYYCTTGSGLYSPDYWGQGTLVTVSS

SEQ ID NO: 26705 - protein, 97 aa, Homo sapiens
VSGDSISGYYWSWIRQSAGKGLEWIGRIYTSGGTDYNPSLNSRITMSIDTSKKLFSLNLRSVTAADTAVYYCARSNDFGIYNLFDPWGQGVLVTVSS

SEQ ID NO: 26706 - protein, 98 aa, Homo sapiens
TVSGGSITGYYWNWLRQPAGKALEWIGRIYTSGTTHYSPSLKSRVTMSLDTSKNQFSLKLSSVTAADTAVYYCARSNDFGIYNLFDPWGQGILVTVSS

SEQ ID NO: 26707 - protein, 98 aa, Homo sapiens
TVSGGSITNYYWNWIRQSAGKGLEWIGRIYTSGTTHYNPSLKSRVTMSLDTSKRQLYLSLTSVTAADTAVYYCARSNDFGIYNLFDPWGPGILVSVSS

SEQ ID NO: 26708 - protein, 95 aa, Homo sapiens
KASGYSFTSYWIAWVRQMPGKGLEWMGTIFPADSDSTYSPSFQGQVTISADKSIDTAYLQWSSLKASDAAMYFCARLDSRGYSYWGQGTLITVSS

SEQ ID NO: 26709 - protein, 95 aa, Homo sapiens
KASGYHFTTYWIAWVRQMPGQGLEWMGTIFPADSDSTYSPSFQGQVTISADKSIDTAYLQWSSLKASDAAMYFCARLDSRGYSYWGQGTLITVSS

SEQ ID NO: 26710 - protein, 94 aa, Homo sapiens
GSGYSFTSNWIGWVRQMPGKGLEWMGIIFPSDSDVRYSPSFQGQVTISADKSISTAYLQWTTLKAADTARYFCARLDSRGYSYWGQGTLITVSS

SEQ ID NO: 26711 - protein, 94 aa, Homo sapiens
GSGYTFTSNWIGWVRQVPGKGLEWMGIIFPSDSDVRYSPSFQGQVTISVDKSISTAYLQWTTLKAADTARYFCARLDSRGYSYWGQGTLITVSS

SEQ ID NO: 26712 - protein, 94 aa, Homo sapiens
GSGFMLRDYWMSWVRQAPGKGLEWVAHINPDESEKLYVDSVKGRFTISKDNTKNSMYLQMNSLRAEDTGVYYCARSTRSSGDYWGQGTPVTVSS

SEQ ID NO: 26713 - protein, 95 aa, Homo sapiens
AVSGFTTSDYWMSWVRQAPGKGLEWVAHINRDGSDRHYANYVKGRFTISKDNAKNSVILELNSLRADDTGVYYCARSTRSSGDYWGQGTLVTVSS

SEQ ID NO: 26714 - protein, 98 aa, Homo sapiens
GVYGGAFNGYYWSWIRQPPGKGLEWIGEINHSGSTNYNPSLKSRATISVDTSKNQLSLKLSSVTAADTAVYYCASLWFGDFYYGMGVWGQGTTVTVSS

SEQ ID NO: 26715 - protein, 98 aa, Homo sapiens
AVYGASFSGYYWSWIRQPPGKGLEWIGEINHSGSTNYSPSLKSRVTMSVDTSKNQFSLKLNSVTAADTAVYYCASLWFGDFYYGMGVWGQGTTVIVSS

SEQ ID NO: 26716 - protein, 98 aa, Homo sapiens
AVYGASFSGYYWSWIRQPPGKGLEWIGEINHSGSTHYSPSLKSRVTMSVDTSKNQFSLKLNSVTAADTAVYYCASLWFGDFYYGMGVWGQGTTVIVSS

SEQ ID NO: 26717 - protein, 97 aa, Homo sapiens
TVSGGSVSSDYWVWIRQPAGKGLEWIGRIYASGSTNYNPSLKSRVTMSVDTSKNQFSLKLSSVTAADTAVYYCARVLDPRYNYFDPWGQGTLVTVSS

SEQ ID NO: 26718 - protein, 97 aa, Homo sapiens
TVSGGSISSYYWTWIRQPAGKGLEWIGRISTSGSTNYNPSLKSRVTMSIDTSKNQFSLKLSSVTAADTAVYYCARVLDPRYNYFDPWGQGTLVTVSS

SEQ ID NO: 26719 - protein, 97 aa, Homo sapiens
TVSGGSISSYYWSWIRQPAGKGLEWIGRISASGITNYNPSFKSRVTMSIDTSKNQFSLRLISVTAADTAVYYCARVLDPRYNYFDPWGQGTLVTVSS

SEQ ID NO: 26720 - protein, 97 aa, Homo sapiens
TVSGGSISAYYWTWIRQPAGKGLEWIGRIYSSGSTIYNPSLKSRVTMSVDTSKNQFSLRLSSVTAADTAVYYCARVLDPRYNYFDPWGQGTLVIVSS

SEQ ID NO: 26721 - protein, 99 aa, Homo sapiens
AASGFNFNNYAMHWVRQAPGKGLEWLAVLWYDESVEYYTDSVKGRFTISRDNSKKTVFLQMNTLRVEDTAVYYCAKDLGLGYNATFDHWGQGALVTVSS

SEQ ID NO: 26722 - protein, 99 aa, Homo sapiens
ETSGFVFSNYAMHWVRQAPGKGPEWLALMWYDGTNTDYADSVKGRFTISRDNLKKTVYLHMNSLRVEDTAMYYCAKDLGLGYNATFDHWGRGTLVTVSS

SEQ ID NO: 26723 - protein, 99 aa, Homo sapiens
ETSGFVFTNYAMHWVRQAPGKGPEWLALMWYDGTKTDYADSVKGRFTISRDNLKKTVYLHMNSLRVEDTAMYYCAKDLGLGYNATFDHWGRGTLVTVSS

SEQ ID NO: 26724 - protein, 99 aa, Homo sapiens
ETSGFLFSNYAMHWVRQAPGKGLEWLALMWYDGSKTDYADSVKGRFTISRDNLKKTVYLHMSSLRVEDTAIYYCAKDLGLGYNATFDHWGRGTLVTVSS

SEQ ID NO: 26725 - protein, 99 aa, Homo sapiens
ETSGFSFNSFAMHWVRQSPGKGLEWVALLWFDGSETRYVDSVKGRFTISRDESGATVYLHMNSLRVEDTAVYYCAKDLGLGYNATFDHWGQGALVTVSS

SEQ ID NO: 26726 - protein, 99 aa, Homo sapiens
ETSGFLFSNYAMHWVRQAPGKGLEWLALLWYDGSETVYADSVKGRFTISRDNLKKTVYLHMNSLRVEDTAMYYCAKDLGLGYNATFDHWGRGSLVTVSS

SEQ ID NO: 26727 - protein, 99 aa, Homo sapiens
AASGFTFNNYAMHWVRQAPGKGLEWLAVLWYDDSVQFYTDSVKGRFTISRDISRKTLFLQMNTLRVEDTAVYYCAKDLGLGYNATFDHWGQGALVTVSS

SEQ ID NO: 26728 - protein, 97 aa, Homo sapiens
TVSGVSISSTNYYWGWIRQPPGQGLEWVGTIYYRGSTYKNPSLKSRVTISVDTSKNQFSLRLTSVTAADTAVYYCANGPYITYFDNWGQGTLVPVSS

SEQ ID NO: 26729 - protein, 97 aa, Homo sapiens
TVSGVSISSTNYYWAWIRQPPGQGLEWVGTIYYRGSTYKNPSLKSRVTISVDTSKNQFSLRLTSVTAADTAVYYCANGPYITYFDNWGQGTLVPVSS

SEQ ID NO: 26730 - protein, 97 aa, Homo sapiens
TVSGVSISSTNYYWAWIRQPPGQGLEWVGTIYYRGSTYKNPSLKSRVTISVDTSKNQFSLRLTSVTAADTAVYYCANGPYITYFDNWGQGTLVTVSS

SEQ ID NO: 26731 - protein, 97 aa, Homo sapiens; identical to SEQ ID NO: 26728

SEQ ID NO: 26732 - protein, 97 aa, Homo sapiens
TVSGVSISSTNYYWGWIRQPPGQGLEWVGTIYYRGSTYKNPSLKSRVTISVDTSKNQFSLRLTSVTAADTAVYYCANGPYITYFDNWGQGTLVTVSS

SEQ ID NO: 26733 - protein, 96 aa, Homo sapiens
AASRFTFSSSWMHWVRQAPGKGLVWVSRINTDGSSTIYADSVKGRFTISRDNAKNTLYLQMNSLRAEDTAVYYCARAGYSNGFDYWGQGTLVTVSS

SEQ ID NO: 26734 - protein, 96 aa, Homo sapiens; identical to SEQ ID NO: 26733

SEQ ID NO: 26735 - protein, 96 aa, Homo sapiens
AASRFTFSSSWMHWVRQAPGKGLVWVSRINTDGSSTIYADSVKGRFTISRDNAKNTLYLQRNSLRAEDTAVYYCARAGYSNGFDYWGQGTLVTVSS

SEQ ID NO: 26736 - protein, 96 aa, Homo sapiens; identical to SEQ ID NO: 26733

SEQ ID NO: 26737 - protein, 96 aa, Homo sapiens
AASGFTFSSNWMHWVRQAPGKGLVWVSRINTDGSTTNYADSVKGRFTISRDNAKNTLYLQMNNLRAEDTALYYCARAGYSNGFDYWGQGTLVTVSS

SEQ ID NO: 26738 - protein, 95 aa, Homo sapiens
ASGFTFSRNWMHWVRQPAGKGLVWVSRINTDGSSASYADSVKGRFTISRDNAKNTLYLQMNSLRVEDTAVYYCARAGYSNGFDYWGQGILVTVSS

SEQ ID NO: 26739 - protein, 95 aa, Homo sapiens
AASGFTFSPHWMGWVRQAAGKGLEWVANIKEDGSDKYYVDSVKGRFTISRDNAKNSLYLQMNSLKAEDTAVYYCARDFYRVFDSWGQGTLVTVSS

SEQ ID NO: 26740 - protein, 95 aa, Homo sapiens
AASGFTFSSWWMGWVRQAPGKGLEWVANINEVGSDKYYVDSVTGRFTVSRDNAKNSLYLQMNSLRAEDTAVYYCARDFYRVFDSWGQGTLVTVSS

SEQ ID NO: 26741 - protein, 99 aa, Homo sapiens
AASGFSFSSYWMHWVRQAPGKGLVWVSRINSDGSNTDYADSVKGRFTISRDNAKNTVYVHMNNLRAEDTAVYFCARGVTMSTITPFGSWGHGTLVSVSS

SEQ ID NO: 26742 - protein, 99 aa, Homo sapiens; identical to SEQ ID NO: 26741

SEQ ID NO: 26743 - protein, 99 aa, Homo sapiens; identical to SEQ ID NO: 26741

SEQ ID NO: 26744 - protein, 103 aa, Homo sapiens
ASGFTFETYWMHWVRQAPGEGLRWVARIDGSSRTPEYADSVKGRFTVSRDNVKRTLYLQIDSLRVEDTAVYYCARVLGFYDRGYLLNYYFDYWGPGTLLTVSS

SEQ ID NO: 26745 - protein, 103 aa, Homo sapiens; identical to SEQ ID NO: 26744

SEQ ID NO: 26746 - protein, 102 aa, Homo sapiens
ASGFTFETYWMHWVRQAPGEGLRWVARIDGSSRTPEYADSVKGRFTVSRDNVKRTLYLQIDSLRVEDTAVYCARVLGFYDRGYLLNYYFDYWGPGTLLTVSS

SEQ ID NO: 26747 - protein, 97 aa, Homo sapiens
EASGFPFSRYWMSWVRQAPGEGLEWVANLKEDGTTTYYGDSVKGRFTISRDNAKNAVYLQMNSLRAEDTAFYYCARVGYTSSSWDYWGQGTLVTVSS

SEQ ID NO: 26748 - protein, 97 aa, Homo sapiens
AASEFTFSNYWMTWVRQAPGKGLEWVANINQDGSQKYYVDSLKGRFTISRDNAKNSLYLHMNSLRAEDTAVYYCARVGYTSSSWDYWGQGTLVIVSS

SEQ ID NO: 26749 - protein, 93 aa, Homo sapiens
TSGFTFSYYYMTWVRQAPGKGLEWVANINKDGSATYYLDSVRGRFAVSRDNARNSLYLQMNNLRVEDTAIYFCARDQLPDPYWGQGTLVSVSS

SEQ ID NO: 26750 - protein, 94 aa, Homo sapiens
AASGFTFSNYWMTWVRQAPGKGLEWVANIKKDGSERYYVDSVKGRFTISRDNAKNSLYLQMDSLRVEDTAIYYCARDQLPDPYWGQGTLVTVSS

SEQ ID NO: 26751 - protein, 92 aa, Homo sapiens
SGFTFSHYWMNWVRQAPGKGLEWVAIANQDGSEKHYVDSVKGRFTVSRDNAKNSLYLQMNSLRVEDTAMYYCARDQLPDPYWGQGTLVTVSS

SEQ ID NO: 26752 - protein, 94 aa, Homo sapiens
AASGFTFNTYWMNWVRQIPGKGLEWVANINADETQKYYVDSVRGRFIISRDNAKNSLYLQMNSLRVEDTAIYYCARDQLPDPYWGPGTQVTVSS

SEQ ID NO: 26753 - protein, 97 aa, Homo sapiens
TVSGGSISSSNYYWGWVRQPPGKGLEYIATSSYSGSTYYNPSLKSRVTISIDTSKNQFSLKLTSVTAADTAVYYCARRDYRTWFDPWGQGILVTVSS

SEQ ID NO: 26754 - protein, 99 aa, Homo sapiens
TVSGGSIRNNIYNLYWGWIRQPPGTGLEWIGGMSTTGSVYYNPSLRGRVTISVDTSRNEFSLRLRSVTAADTAEYYCARRDYRTWFDPWGRGILVTVSS

SEQ ID NO: 26755 - protein, 95 aa, Homo sapiens
TVSGGSISSSNYNWGWIRQPPGKGLEWIGSIYYTGSTNYNPSLKSRVTISVDTSKNQFSLNLSSVTAADTAVYYCARRGGGFAYWGQGTLVTVSS

SEQ ID NO: 26756 - protein, 95 aa, Homo sapiens; identical to SEQ ID NO: 26755

SEQ ID NO: 26757 - protein, 95 aa, Homo sapiens
IVSGGSISSSSYYWSWIRQSPGKGLEWIGSIYYSGSTYYNPSLKSRVFISVDTSMNQFSLKLSSVTAADTAVYYCARRGGGFAYWGQGTLVTVSS

SEQ ID NO: 26758 - protein, 95 aa, Homo sapiens; identical to SEQ ID NO: 26757

SEQ ID NO: 26759 - protein, 100 aa, Homo sapiens
AVYGGSFSGYYWSWIRQPPGKGLEWVGEVTHSGSTNYNPSLKSRVTISVDKSKNQFSLKLNSVTAADTALYYCAGAVVVTAMDYWYFDLWGRGTLVTVSS

SEQ ID NO: 26760 - protein, 100 aa, Homo sapiens
AVYGGSLNGYYWSWIRQSPGKGLEWIGQINYRGSTNYNPSLKSRVTMSVHTSNNQFSLKLSSVTAADTAIYYCAGAVVVTAMDYWYFDLWARGTLVTVSS

SEQ ID NO: 26761 - protein, 100 aa, Homo sapiens
AVYGGSFSGYYWSWIRQPPGKGLEWIGEINHRGGTNYNPSLKSRVTISVDTSKNQFSLKLTSVTAADTAVYYCAGAVVVTAMDYWYFDLWGRGTLVTVSS

SEQ ID NO: 26762 - protein, 100 aa, Homo sapiens
AVYGGSFSGYYWSWIRQPPGKGLEWVGEVTHSGRTNYNPSLKSRVTISVDKSKNQFSLKLNSVTAADTALYYCAGAVVVTAMDYWYFDLWGRGTLVTVSS

SEQ ID NO: 26763 - protein, 100 aa, Homo sapiens
AVYGASFSGYYWSWIRQPPGKGLEWIGEINHSGNTNYNPSLKSRVTISLDTSRNQFSLKLTSVTAADTAVYYCAGAVVVTAMDYWYFDLWGRGTLVTVSS

SEQ ID NO: 26764 - protein, 100 aa, Homo sapiens; identical to SEQ ID NO: 26759

SEQ ID NO: 26765 - protein, 100 aa, Homo sapiens
AVYGGSFSGYYWSWIRQPPGKGLEWIGQISHSGSSSYNPSLKSRVAMSVDTSRNQFSLRLTSVTAADMAVYYCAGAVVVTAMDYWYFDLWGRGTLVTVSS

SEQ ID NO: 26766 - protein, 100 aa, Homo sapiens
AVYGGSFSGHYWSWIRQPPGKGPEWIGQISHSGSTSYSPSLKSRAAISVDTSRNQFSLRLTSVTAADMGVYYCAGAVVVTAMDYWYFDLWGRGTLVTVSS

SEQ ID NO: 26767 - protein, 93 aa, Homo sapiens
AASGFTLSNYDIHWVRQATGKGLEWISAIGSTGDTSYAGSVKGRFTISRENAKNSLYLQMNSLRAGDTAVYYCVRATSGFDYWGQGTLVTVSS

SEQ ID NO: 26768 - protein, 93 aa, Homo sapiens
AASGFTLSNYDIHWVRQATGKGLEWISAIGSSGDTSYAGSVKGRFTISRENAKNSLYLQMNTLRAGDTALYYCVRATSGFDYWGQGTLVTVSS

SEQ ID NO: 26769 - protein, 93 aa, Homo sapiens
AASGFTLSNYDIHWVRQATGKGLEWISAISSAGDTPYAGSVKGRFTISRENAKNSLYLQMNNLRAGDTAVYYCVRATSGFDYWGQGTLVTVSS

SEQ ID NO: 26770 - protein, 93 aa, Homo sapiens
AASGFTFSLYDMHWVRQATGKGLEWVSGIGTAGDPSYIGSVKGRFTTSRENAKNSLYLQMNSLRAGDTAVYFCVRATSGFDYWGQGTLVTVSS

SEQ ID NO: 26771 - protein, 93 aa, Homo sapiens
AASGFTFSLYDMHWVRQATGKGLEWVSGIGSAGDPSYIGSVKGRFTTSRDNAKNSLYLQMNSLRAGDTAVYFCVRATSGFDYWGQGTLVTVSS

SEQ ID NO: 26772 - protein, 98 aa, Homo sapiens
ASGLSFGTSTVQWVRQARGQRLEWIGWFRLGNGDTRSAQIFQKRVTFTTDLSTNTAYMELSSLTSEDTAVYYCAAETYSGSCCWFDPWGQGTLVTVSS

SEQ ID NO: 26773 - protein, 97 aa, Homo sapiens
SGLTFASSAIQWVRQARGQRLEWIGWIVVGSGNTKYTQKMQERVTITRDMSTSTAYMELSSLTPEDTAVYYCAAETYSGSCCWFDPWGQGTLVTVSS

SEQ ID NO: 26774 - protein, 97 aa, Homo sapiens
SGFTFGTSAIQWVRQARGQRLEWIGWLVVGSGDTSYAQHLQGRLSIFRDMSTSTAYMELRGLRSDDTAVYYCAAETYSGSCCWFDPWGQGTPVTVSS

SEQ ID NO: 26775 - protein, 95 aa, Homo sapiens
AASGFTFSGYWMHWVRQAPGKGLVWVSRIHSDGSSSTYADFVKGRFTISRDNAKNTLYLQMNSLRAEDTAVYYCARGGTYSFDYWGQGTLVTVSS

SEQ ID NO: 26776 - protein, 95 aa, Homo sapiens
AASGFTFSNYWMHWVRQAPGKGLVWVSRINQDGSGTTYADSVTGRFTISRDNAKNVLYLQMNSLRAEDTAVYYCARGGTYSFDYWGQGTVVTVSS

SEQ ID NO: 26777 - protein, 94 aa, Homo sapiens
AASGFTFSNYWMHWVRQAPGKGLVWVSRINHDDSTTYADSVTGRFTISRDNAKNTLYLQMNSLGAEDTAVYFCARGGTYSFDYWGQGTRVTVSS

SEQ ID NO: 26778 - protein, 97 aa, Homo sapiens
AASGFTFSDYYMDWVRQAPGKGLEWVGRIKHKPESYTTEYAASVRGRFTISRDDSKNSLYLQMDSLKTEDTAVYYCARDSMGSYDYWGQGTLVTVSS

SEQ ID NO: 26779 - protein, 97 aa, Homo sapiens; identical to SEQ ID NO: 26778

SEQ ID NO: 26780 - protein, 97 aa, Homo sapiens; identical to SEQ ID NO: 26778

SEQ ID NO: 26781 - protein, 97 aa, Homo sapiens; identical to SEQ ID NO: 26778

SEQ ID NO: 26782 - protein, 97 aa, Homo sapiens
AASGFTFSDHQMDWVRQAPGKGLEWIGRARDKGYSYSTEYAASVKGRFTISRDDSKNSLYLQMNGLKTEDTAVYYCARDSMGSYDYWGQGTLVTVSS

SEQ ID NO: 26783 - protein, 94 aa, Homo sapiens
AASGLTFRNYWMTWVRQAPGKGLEWVANIKFGATETYYVDSVRGRFTIFRDDAKNSLYLEMSSLRSDDTAVYYCATGRVGRDYWGQGTLVTVSS

SEQ ID NO: 26784 - protein, 94 aa, Homo sapiens
AASGFIFSAYWMTWVRQAPGKGLEWVANIKQGGSERYYVDSVKGRFTISRDDAKNSVYLQMNSLRAEDTAVYYCATGRVGRDYWGQGTLVTVSS

SEQ ID NO: 26785 - protein, 99 aa, Homo sapiens
EASGFTFSDYEMNWVRQAPGKGLEWVSHISSSGSTIYYADSVKGRFTISRDNAKSSLYLQMNSLRAEDTAVYYCARDRGYSYGYWFDPWGQGTLVTVSS

SEQ ID NO: 26786 - protein, 99 aa, Homo sapiens
AASGFTISSFDMNWVRQAPGKGLEWISYISSSGGTIYYADSVKGRFTISRDSAKNSLYLQMNSLRAEDTAVYYCARDRGYSYGYWFDPWGQGTLVTVSS

SEQ ID NO: 26787 - protein, 94 aa, Homo sapiens
ASGYTFTSYGISWVRQAPGQGLEWMGWISTSSGDTKFAQRLQGRVSLTKDTSTSTVYMELRTLRSDDTAVYYCARDRDWTLDYWGQGTLVTVSS

SEQ ID NO: 26788 - protein, 94 aa, Homo sapiens
ASGYTFTNYGISWVRQAPGQGPEWVGWISTQKGKTKYAQKLQGRVTMTTDTSTTTAYMELRSLRSDDTAVYYCARDRDWTLDYWGQGTLVTVSS

SEQ ID NO: 26789 - protein, 97 aa, Homo sapiens
AASGFIFGSYVMHWVRQAPGKGLESVAVISDDGSRTYYAVSVEGRFTVSRDISRNTLYLEMSSLTSDDSAIYYCARSREGYNLLDYWGQGALVSVSS

SEQ ID NO: 26790 - protein, 97 aa, Homo sapiens
AASGFTFSGYAIHWVRQAPGKGLEWVAAIPSDGSKTYYTDSVKGRFTISRDNPKSTLYLQMNSLRSEDTAVYYCARSREGYNLLDYWGQGTLVTVSS

SEQ ID NO: 26791 - protein, 96 aa, Homo sapiens
AASGFIFSSYWMYWVRQAPGKGLVWVSRINSDGSSTSYADSVKGRFTISRDNAKNTLYLQMNNLRAEDTAVYYCAGGYYYYGMDVWGQGTTVTVSS

SEQ ID NO: 26792 - protein, 96 aa, Homo sapiens
AASGFTFSSYWMHWVRQAPGKGLVWVSRINSDGSSTSYADSVKGRFTISRDNAKNTLYLQMNSLRAEDTAVYYCAGGYYYYGMDVWGQGTTVTVSS

SEQ ID NO: 26793 - protein, 95 aa, Homo sapiens
KGSGYTFTDYWIGWVRQMPGKGLEWMGIIYPGDSDTRYSPSFQGQVTISADKSISTAYLQWTSLKASDTGMYYCARYKAATGTDYWGQGTLVTVS

SEQ ID NO: 26794 - protein, 96 aa, Homo sapiens
KASGYIFTDYWIAWVRQMPGKGLEWMGIIYPDDSDTRYSPSFQGQVTISADKSISAAYLQWSSLKASDTAMYYCARYKAATGTDYWGQGTLVTVSS

SEQ ID NO: 26795 - protein, 93 aa, Homo sapiens
AASGFTFSGYWMNWVRQVPGKGLLWVARINADGSTTSYADSVKGRFTISRDNAKNTLYLQVNSLRAEDTALYYCTRTNNLDYWGQGTLVTVSS

SEQ ID NO: 26796 - protein, 93 aa, Homo sapiens
AASGFTFSDNWMHWVRQAPGKGLVWVSRINSDGSNTKYADSVKGRFTISRDNAKNTLYLQMNSLRAEDTAIYYCTRTNNLDYWGQGTLVTVSS

SEQ ID NO: 26797 - protein, 100 aa, Homo sapiens
KGSGYIFSSYWIAWVRQMPGKGLEWMGIIYPGDSDTRYSPSFQGQVTISADKSISTAYLQWSSLKASDTAMYYCVRHFRVGATLSWFDPWGQGTLVTVSS

SEQ ID NO: 26798 - protein, 100 aa, Homo sapiens
KGSGYSFTTYWIGWVRQMPGKGLEWMGIIYPGDSDTRYSPSFQGQVTISADKSVSTAYLQWSSLKASDTAMYYCVRHFRVGATLSWFDPWGQGTLVTVSS

SEQ ID NO: 26799 - protein, 107 aa, Homo sapiens
TQTLTLTCTFSGFSLSTTGVGVGWIRQPPGEALEYLVVIYWDDDKRYNPSLKSRLTITKDTSKNQVVFTMTNMDPMDTATYYCVRRPLRGQDWFDPWGQGILVTVSS

SEQ ID NO: 26800 - protein, 107 aa, Homo sapiens
TQTLTLTCTFSGFSLRTTGVGVGWIRQPPGKALEWLALIYWDDDKRYSPSLKSRLTITKDTSKNQVVLTMTNMDPVDTATYFCVRRPLRGQDWFDPWGQGTLVIVSS

SEQ ID NO: 26801 - protein, 97 aa, Homo sapiens
AASKFTFSTYAMHWVRQTPGKGLEWVALISFNGNNEYYADSVKGRFAISRDNAKNTLFLQMDSLRPEDTAVYYCARGHYDSSAFDYWGQGTLVTVSS

SEQ ID NO: 26802 - protein, 97 aa, Homo sapiens
AASRFTFSTYAMHWVRQAPGKGLEWVALISFDGVNKYYADSVKGRFTISRDNSKNTLYLQMISLRTEDTALYYCARGHYDSSAFDYWGQGTLVTVSS

SEQ ID NO: 26803 - protein, 97 aa, Homo sapiens
AASRFTFSTYAMHWVRQAPGKGLEWVALISFDGRNKYYADSVKGRFTISRDNSKNTLDLQMISLRTEDTALYYCARGHYDSSAFDYWGQGTLVTVSS

SEQ ID NO: 26804 - protein, 97 aa, Homo sapiens; identical to SEQ ID NO: 26802

SEQ ID NO: 26805 - protein, 98 aa, Homo sapiens
AASGFTFSGFAMSWVRQAPGKGLEWVSTISGRTSNTYYADSVMGRFTISRDNSRSTLYLQVNSLRAEDTAVYYCARPRYFDLGYFDSWGQGTLVTVSS

SEQ ID NO: 26806 - protein, 97 aa, Homo sapiens
AASGFTFSRFAVTWVRQAPGKGLEWVSTISNSGGTYYADSVKGRFSISRDNAKNTLYLQMNSLRAEDTALYYCARPRYFDLGYFDSWGQGALVTVSS

SEQ ID NO: 26807 - protein, 99 aa, Homo sapiens
ATSGFTFDDYAMHWVRQLPGKGLEWLSLISADGGRTYYADSVKGRFTISRDNSKSSLSLQMNSLRTEDTALYHCAKGLGYYYYYGLDVWGQGTTVTVSS

SEQ ID NO: 26808 - protein, 99 aa, Homo sapiens
AASGFTFDDYAMHWVRQVPGKGLEWVSLISADGGRPYYADSVKGRFTISRDNGKASLDLQMNNLRTEDTALYYCAKGLGYYYYYGLDVWGQGTMVTVSS

SEQ ID NO: 26809 - protein, 95 aa, Homo sapiens
AASGFTFSTYWMSWVRQAPGKGLEWVANIKPDGSKNSYVDSVKGRFSISRDNAKNSLYLQMNSLRVEDTALYYCATHNSWRFDYWGQGTLVTVSS

SEQ ID NO: 26810 - protein, 95 aa, Homo sapiens
AASGFTFSHYWMTWVRQAPGKGLEWVAKIKQDGSEKYYVDSVRGRFTISRDNAKNSLFLQMNSLRAEDTAVYYCATHNSWRFDYWGQGTLVTVSS

SEQ ID NO: 26811 - protein, 95 aa, Homo sapiens
TAFGFTSSDHHINWVRHAPGKGLEWLGVIRGNPSSGTTEYAASVKGRFIISRDDSKSIAYLQMNSLKTEDTAVYFCTRGYHLDYWGQGTLVTVSS

SEQ ID NO: 26812 - protein, 95 aa, Homo sapiens
TASGFTFGDHHMNWVRQAPGKGPEWVGFIRNKAFGGTTEAAASVKGRFTISRDDSKSIAYLQMNSLKTEDTGVYYCTRGYHLDYWGLGTLVTVSS

SEQ ID NO: 26813 - protein, 94 aa, Homo sapiens
AASGFTFSSHWMSWVRQAPGKGLEWVANIDQYRSEKYYVDSVKGRFTISRDNAKNSLYLEMNSLRAEDTAVYYCARGLRTVDYWGQGTLVTVSS

SEQ ID NO: 26814 - protein, 94 aa, Homo sapiens
AASGFTFSSYWMTWVRQAPGKGLEWVANIKPDGSEKYYVDSVKGRFTISRDNAKNSLYLQVNSLRAEDMAVYYCARGLRTVDYWGQGTLVTVSS

SEQ ID NO: 26815 - protein, 108 aa, Homo sapiens
TVSGGSISSSNYYWGWIRQPPGKGLEWIGSIYYSGSTYYNPSLKSRVTISVDTSKNQFSLKLSSVTAADTAVYYCARHGGGSYYDILTGYSLGAFDIWGQGTMVTVSS

SEQ ID NO: 26816 - protein, 108 aa, Homo sapiens
TVSGGSISSSNFYWGWIRQPPGQGLEWIGSIYSGGSTYYNPSLKSRVSISVDTSKNQFSLRLSSVTAADTAVYYCARHGGGSYYDILTGYSLGAFDIWGQGTMVTVSS

SEQ ID NO: 26817 - protein, 94 aa, Homo sapiens
TVSGGSINGGGYSWTWIRQHPGKGLEWIGYISYNENTNYNPSLKSRITMTLDTSKNQFSLRLTSVTAADTAVYYCARDLYYGMDVWGQGTTVTV

SEQ ID NO: 26818 - protein, 94 aa, Homo sapiens
TVSGGSINGGGYSWTWIRQHPGKGLEWIGYISYNENTNYNPSLKSRVTMALDTSKNQFSLRLSAVTAADTAVYYCARDLYYGMDVWGQGTTVTV

SEQ ID NO: 26819 - protein, 96 aa, Homo sapiens
TVSGGSISSGGYYWSWIRQHPGKGLEWIGYIYYSGSTYYNPSLKSRVTISVDTSKNQFSLKLSSVTAADTAVYYCARDLYYGMDVWGQGTTVTVSS

SEQ ID NO: 26820 - protein, 96 aa, Homo sapiens
ASGYTFTTYYIHWVRQAPGQGLEWMGRINPSDASTYYVQKFQGLFTMTSDTSTSTVSMELGSLTSEDTAVYYCARERPGTYYFDYWGQGTLVTVSS

SEQ ID NO: 26821 - protein, 96 aa, Homo sapiens
ASGYTFTTYFIHWVRQAPGQGLEWMGRIDPSDATTYYVEKFLDPFTMTSDTSTSTVSMYLGSLTSEDTAVYYCARERPGTYYFDYWGQGTLVTVSS

SEQ ID NO: 26822 - protein, 96 aa, Homo sapiens
ASGFTFTSYYIHWVRQAPGQGLEWMGTVNPTGDTTRYGQKFQGRVTLTRDTSTTTVYMELSSLTSDDTAVYYCARERPGTYYFDYWGQGTLVTVSS

SEQ ID NO: 26823 - protein, 98 aa, Homo sapiens
TFSGGSIGTYYWSWIRQPPGRRLEWIAYIYYSGDTKFHPSLKSRVSISLDTSNNQFSLKLRSVTAADTAVYYCARGSIAASGWYFDYWGQGTLVTVSS

SEQ ID NO: 26824 - protein, 98 aa, Homo sapiens
TFSGGSIGTYYWSWIRQSPGGRLEWIAYIYYSGDTKFHPSLKSRVSISLDTSNNQFSLKLRSVTAADTAVYYCARGSIAASGWYFDYWGQGTLVTVSS

SEQ ID NO: 26825 - protein, 98 aa, Homo sapiens; identical to SEQ ID NO: 26824

SEQ ID NO: 26826 - protein, 98 aa, Homo sapiens
TFSGGSIGTYYWSWIRQSPGRRLEWIAYIYYSGSTKYHPSLKSRVSISLDTSKNQFSLKLSSVTAADTAVYYCARGSIAASGWYFDYWGQGTLVTVSS

SEQ ID NO: 26827 - protein, 98 aa, Homo sapiens
TISGGSIGTHYWSWIRQPPGKSLEWIAYIYYDGSTKYNPSLESRITISLDTSKKQFSLKLTSVTAADTAVYYCARGSIAASGWYFDYWGQGTLVTVSS

SEQ ID NO: 26828 - protein, 93 aa, Homo sapiens
AASGFTFSSYWMTWVRQAPGKGLEWVANIKQDGSEKYYVDSVKGRFTISRDNAKNSVYLQMNSLRAEDTAVYYCARGSAGDYWGQGTLVTVSS

SEQ ID NO: 26829 - protein, 93 aa, Homo sapiens
AASGFSFSNYWMTWVRQAPGKGLEWVANIKYDGSEKYFVDSVKGRFTISRDNAKNSLYLQMNSLRAEDTAVYYCARGSAGDYWGQGTLVTVSS

SEQ ID NO: 26830 - protein, 95 aa, Homo sapiens
TVSGDSISSYYWSWIRQPPGKGLEWIGYIHYSGSTNYNPSLKSRVTMSVDTSKNQVSLKLSSVTAADTAVYYCARRYTSGYYDYWGQGTLVTVSS

SEQ ID NO: 26831 - protein, 95 aa, Homo sapiens
TVSGDSISSYYWSWIRQPPGKGLEWIGYVHYSENNNYNPSLKSRVTMSVDTSKNQVSLELSSMTSADTALYYCARRYTSGYYDYWGQGTLVTVSS

SEQ ID NO: 26832 - protein, 95 aa, Homo sapiens
TVSGDSISGYYWSWNRQPPGKGLEWIGYIYYSGSTNYNPSLKSRVTISVDTSKNQFSLKLSSVTAADTAVYYCARRYTSGYYDYWGQGALVTVSS

SEQ ID NO: 26833 - protein, 96 aa, Homo sapiens
ASGFTFRSYWMFWVRQGPGKGLEWVTRIKTDGSSTTYADSLKGRFIITRDNAKNTLYLQMNSLSAEDTAVYYCARDLVATGAFDIWGQGTMVTVSS

SEQ ID NO: 26834 - protein, 97 aa, Homo sapiens
AASGFIFSNYWMFWVRQAPGKGPVWVSRIKTDGTISNYADSVKGRFTISRDNAKNMLYLQMNSLRGEDTAVYYCARDLVATGAFDIWGLGTMVTVSS

SEQ ID NO: 26835 - protein, 97 aa, Homo sapiens
AASEFTFRNYWMFWVRQAPGKGLEWVSRIKTDGSRTTYADSVKGRFTISRDNAKNTLYLQMNSLRGEDTAMYYCARDLVATGAFDIWGQGTMVTVSS

SEQ ID NO: 26836 - protein, 95 aa, Homo sapiens
TVSGDSISSYYWSWIRQPPGKGLEWIGYIHYSGSTNYNPSLKSRVTMSVDTSKNQVSLKLSSVTAADTAMYYCARRGSSGYYDYWGQGTLVTVSS

SEQ ID NO: 26837 - protein, 95 aa, Homo sapiens
TVSGGSISSYYWSWFRQPPGKGLEWIGYIYYSGTTNYNPSLKSRVSMSVDTSKNQFSLKLSSVTAADTAVYYCARRGSSGYYDYWGQGTLVIVSS

SEQ ID NO: 26838 - protein, 93 aa, Homo sapiens
AASGFTFNSYWIHWVRQAPGKGLVWVSRISPEGSVTNYADSVKGRFTISRDNTQNTVYLQMNSLRAEDTAVYYCARIGYDSGWGQGTLVTVSS

SEQ ID NO: 26839 - protein, 93 aa, Homo sapiens
AASGFTFNNYWVHWVRQAPGKGLVWVSRISPEGSVTNYADSVKGRFTISRDNTQNTVYLQINSLRAEDTAMYYCARIGYDSGWGQGTLVTVSS

SEQ ID NO: 26840 - protein, 92 aa, Homo sapiens
ASGFTFNSYWIHWVRQAPGKGLVWVSRISPEGSATNYADFVKGRFTLSRDNPQNTVYLQMNSLRAEDTALYYCARIGYDSGWGQGTLVTVSS

SEQ ID NO: 26841 - protein, 93 aa, Homo sapiens
AASGFKFSDSFIHWVRQPPGKGLVWVSRTVPDGTFSTYAGSVKGRFTISRDNAKNMVYLQMDRLRLDDSAIYYCARIGYDSGWGQGTLVTVSS

SEQ ID NO: 26842 - protein, 93 aa, Homo sapiens; identical to SEQ ID NO: 26841

SEQ ID NO: 26843 - protein, 99 aa, Homo sapiens
AASGFTFSGYVMSWVRQAPGKGLELVSSIYRDGGWTYYADSVKGRFTVSRDNSRNTLYLQMKSLRAEDTAVYYCAKDRDDHGDYCFDYWGQGTLVTVSS

SEQ ID NO: 26844 - protein, 99 aa, Homo sapiens
AASGFPFSAYVMSWVRQAPGKGLEWVSTVWHHNDNTQYTDSVKGRFTISRDNIRNTLYLQMNSLRAEDTAVYYCAKDRDDHGDYCFDYWGQGTLVTVSS

SEQ ID NO: 26845 - protein, 99 aa, Homo sapiens
AASGFSFSGYVMSWVRQAPGKGLEWVSGIYRTGEGTYYTDSVKGRFTISRDNSKNTLYLQMNGLRAEDTAIYYCAKDRDDHGDYCFDYWGQGTLVTVSS

SEQ ID NO: 26846 - protein, 99 aa, Homo sapiens; identical to SEQ ID NO: 26845

SEQ ID NO: 26847 - protein, 99 aa, Homo sapiens
AASGFPFSAYVMSWVRQAPGKGLEWVSTVWHHNDNTQYTDSVKGRFTISRDNSRNTLYLQMNSLRAEDTAVYYCAKDRDDHGDYCFDYWGQGTLVTVSS

SEQ ID NO: 26848 - protein, 99 aa, Homo sapiens; identical to SEQ ID NO: 26847

SEQ ID NO: 26849 - protein, 103 aa, Homo sapiens
AASGFIFTEAWMHWVRQAPGKGLEWVGRIKRNVDGGTTDYAAPVKGRFTVSREDSKSTLFLQMSSLKTEDTAMYYCATDWGSGTYYVRAFDLWGQGTMVTVSS

SEQ ID NO: 26850 - protein, 103 aa, Homo sapiens
AASGFSFTGAWMNWVRQAPGKGLEWVGRIKSKKDGATTDYAAPVKGRFTVSRDDSKNTLYLQMNNLRSEDTALYYCATDWGSGTYYVRAFDLWGQGTMVTVSS

SEQ ID NO: 26851 - protein, 100 aa, Homo sapiens
AASGFTFSNYDMSWVRQAPGKAPEWVSAIVGSGYSTYYADSIKGRFTISRDNSKNTLYLQMNSLRAEDTAVYYCAKDEGQYSGYGNFDYWGQGTLVTVSS

SEQ ID NO: 26852 - protein, 100 aa, Homo sapiens
AASGFTFNNYDMSWLRQAPGKGLEWLSAITGSGDATYYADSVKGRFTISRDNSKNMVYLQVNSLRAEDTAIYYCAKDEGQYSGYGNFDYWGQGTLVTVSS

SEQ ID NO: 26853 - protein, 91 aa, Homo sapiens
ASEFSFSVFWMSWVRQAPGKGLEWVATARHDEDTKYYVDSVKGRFTISRDNAKNSLYLEIHSLRVEDTAVYYCVGASLDFWGQGTLLIVSS

SEQ ID NO: 26854 - protein, 92 aa, Homo sapiens
AASGFTFSNYWMTWVRQTPGKGLEWVATIRHDIGVRYYVDSVRGRFTISRDNAKSSFYLQMSSLRAEDTAVYYCVGASLDFWGQGTLVIVSS

SEQ ID NO: 26855 - protein, 92 aa, Homo sapiens
AASGFTFSNYWMTWVRQTPGKGLEWVATIRHDTGVKYYVDSVRGRFTISRDDAKSSLYLQMNTLRAEDTAVYYCVGASLDFWGQGTLVTVSS

SEQ ID NO: 26856 - protein, 92 aa, Homo sapiens; identical to SEQ ID NO: 26855

SEQ ID NO: 26857 - protein, 92 aa, Homo sapiens
AASGFSFSAYWMTWVRQTPGKGLEWVATIRHDTGVQYYVDSVRGRFTISRDNAKSSLYLQMDSLRAEDTAVYYCVGASLDFWGQGTLVIVSS

SEQ ID NO: 26858 - protein, 92 aa, Homo sapiens
AASGFTFSDYWMTWVRQSPGKGLEWVATIRHDIGVRYYVDSVRGRFTISRDNAKRSLYLQMNSLRAEDTAVYYCVGASLDFWGQGTLVVVSS

SEQ ID NO: 26859 - protein, 93 aa, Homo sapiens
AASGFTFSSYWMTWVRQAPGKGLEWVANIKEDGSEKNHVDSVKGRFTISRDNAKKSVYLQMNSLRAEDTAVYYCARLRYHDYWGQGTLVTVSS

SEQ ID NO: 26860 - protein, 93 aa, Homo sapiens
AASGFTFSSYYMTWVRQAPGKGLEWLANINQDGREENYADSVKGRFIISRDNAKNSVFLQMNSLRAEDTAVYYCARLRYHDYWGQGLLVTVSS

SEQ ID NO: 26861 - protein, 92 aa, Homo sapiens
TVSGDSISTGGYYWSWIRQHPGKGLEWIGYTYYSGRPYYNPSLKSRVSISVDKSNNQFSLHLNSVTAADTAVYYCAKTLRDWGQGTLVIVSS

SEQ ID NO: 26862 - protein, 92 aa, Homo sapiens
TVSGDSISSGGYYWTWIRQQPGKGLEWIGYTYWSGRTLYNPSLNSRVTITVDKSNNQFSLHLESVTAADTAVYYCAKTLRDWGQGTLVIVSS

SEQ ID NO: 26863 - protein, 92 aa, Homo sapiens
TVSGDSISSGGFYWSWIRQHPGKGLEWIGYTYYSGRPYYNPSLKSRVFISVDKSNNQFSLHLNSVTAADTAVYYCAKTLRDWGQGTLVIVSS

SEQ ID NO: 26864 - protein, 92 aa, Homo sapiens
TVSGDSISRGGYYWSWIRHHPGKGLEWIGYIYYSGTSLYNPSLKSRLTISVDKSKNQFSLSLTSVTAADTAVYYCAKTLRDWGQGTLVTVSS

SEQ ID NO: 26865 - protein, 97 aa, Homo sapiens
AASGFTFSSYAMSWVRQAPGKGLEWVSAISGSGGDTYYADSVKGRFTISRDNSKNTLYLQMNSLRAEDTAVYYCAKDIITIDAFDIWGQGTMVTVSS

SEQ ID NO: 26866 - protein, 97 aa, Homo sapiens
AASGFTFSTYAMSWVRQAPGKGLEWVSTISGGDYSTYYGDSVRGRFTISRDDSQNTLSLQMNSLRAEDTAIYYCAKDIITIDAFDIWGQGTMVTVSS

SEQ ID NO: 26867 - protein, 97 aa, Homo sapiens
AASGFTFSSYAMSWVRQAPGKGLEWVSAISRSGDSTYFADSVKGRFTISRDNSKNTMYLQMNSLRAEDTAVYYCAKDIITIDAFDIWGQGTMVTVSS

SEQ ID NO: 26868 - protein, 95 aa, Homo sapiens
TVSGGSISGYFWTWIRQPPGKGLEWIGYIHKSGNTNYNPSLKSRVTISIDTSRNQFSLNLNSVTAADTAVYYCAGGKQWLAFDLWGQGPLVTVSS

SEQ ID NO: 26869 - protein, 94 aa, Homo sapiens
VSGGSFGSYYWSWIRQSPGKGLEYIGCFYNSGSTNYNPSLQSRVTISVDTSKNQLSLMLSPVTAADTAIYYCAGGKQWLAFDLWGQGALVTVSS

SEQ ID NO: 26870 - protein, 104 aa, Homo sapiens
AASGFTFGDYGMSWVRQPPGKGLEWVSGINWDGGRTGYADSVKGRFTISRDNAKNSLYLQMNSLRAEDTALYHCARVAYYYDSSGYYKYYFDYWGQGTLVTVSS

SEQ ID NO: 26871 - protein, 104 aa, Homo sapiens
AASGFTFDDYGMSWVRQAPGKGLEWVSGINWNGGSTGYADSVKGRFTISRDNAKNSLNLQMNSLRAEDTALYHCARVAYYYDSSGYYKYYFDYWGQGTLVTVSS

SEQ ID NO: 26872 - protein, 98 aa, Homo sapiens
AASGFTFTSYAMSWVRQAPGKGLEWVSVIYSGGSSTYYADSVKGRFTISRDNSKKTVYLQMNSLRAEDTAVYYCAKGDTAMVYYFDYWGQGTLVTVSS

SEQ ID NO: 26873 - protein, 98 aa, Homo sapiens
AASGFTFSSYAMSWVRQAPGKGLEWVSVIYSGGSSTYYADSVKGRFTIFRDNSKNTLYLQMNSLRAEDTAVYYCAKGDTAMVYYFDYWGQGTLVTVSS

SEQ ID NO: 26874 - protein, 98 aa, Homo sapiens
AASGFTFSSYAMSWVRQAPGKGLEWVSAIGGSGGSTYYADSVKGRFTISRDNSKNTLYLQMNSLSAEDTAVYYCAKGDTAMVYYFDYWGLGTLVTVSS

SEQ ID NO: 26875 - protein, 106 aa, Homo sapiens
TQTLTLTCTFSGFSLSTSGASVGWIRQPPGKALEWLALIYWDDDKRYSPSLKSRLTITKDTSKNQVVLTMTNMDPVDTATYYCAHNDYGDYVFDYWGQGTLVTVSS

SEQ ID NO: 26876 - protein, 106 aa, Homo sapiens
TQTLTLTCTFSGFSLSSRRAGVGWIRQPPGKALEWLALIYWDDDERYSPSLKSRLTITKDTSKNQVVLTMTNMDPVDTATYYCAHNDYGDYVFDYWGQGTLVTVSS

SEQ ID NO: 26877 - protein, 96 aa, Homo sapiens
AASGFTFSVYAMSWVRQAPGKGLEWVSIIYNDSRDRFYADSVKGRFTVSRDNSKNTLYLQMNSLRVEDTAVYYCVKDHGRAENDYWGQGTLVTVSS

SEQ ID NO: 26878 - protein, 96 aa, Homo sapiens
VVSGFTFNNYAMTWVRQAPGKGLEWVSIIYRDSSRTFYADSVQGRFTVSRDNSRNTVYLQMNSLRAEDTATYHCVKDHGRAENDYWGQGTLVTVSS

SEQ ID NO: 26879 - protein, 96 aa, Homo sapiens
AVSGFTFSNYAMTWVRQAPGKGPEWVSVIYRDSSRTFYADSVKGRFTVSRDNSKNTVYLQMNSLRAEDTAIYHCVKDHGRAENDYWGQGTLVTVSS

SEQ ID NO: 26880 - protein, 93 aa, Homo sapiens
GFTFSNYAMTWVRQAPGKGPEWVSVIYRDSSRTFYADSVKGRFTVSRDNSKNTVYLQMNSLRAEDTAIYHCVKDHGRAENDYWGQGTLVTVSS

SEQ ID NO: 26881 - protein, 94 aa, Homo sapiens
ISGDSVSSNSAAWTWIRQSPSRGLEWLGRTYYRSKWYNDYAVSVKSRIIIYPDTSKNQFSLQLNSVTPEDTAVYYCASRRYDYWGQGTLVTVSS

SEQ ID NO: 26882 - protein, 94 aa, Homo sapiens
ISGDSVSGASEVWNWIRQSPSRGLEWLGRTYYRSEWSSDYALSVKSRIAIIPDTAKNQFSLQLDSLTPEDTAVYFCASRRYDYWGQGTLVTVSS

SEQ ID NO: 26883 - protein, 96 aa, Homo sapiens
AASAFTFNNAWMSWVRQAPGKGLEWVGRIKSQTDGGTTDYAAPVEGRFTISRDDSKKMLYLQMNSLKSDDTAVYYCTTGHGYSPYWGQGTLVTVSS

SEQ ID NO: 26884 - protein, 96 aa, Homo sapiens
AASGFTFSDAWMSWVRQAPGKGLEWVGRIKSQTYGGTTDYAAPVRGRFTISRDDSKATLFLQMESLETEDTAVYYCTTGHGYSPYWGQGTLVTVSS

SEQ ID NO: 26885 - protein, 92 aa, Homo sapiens
AASGFTFSSYSMNWVRQAPGKGLEWVSYISSSSSTIYYADSVKGRFTISRDNAKNSLYLQMNSLRDEDTAVYYCARGGLQHWGQGTLVTVSS

SEQ ID NO: 26886 - protein, 92 aa, Homo sapiens
AASGFTFSSYSMNWVRQAPGKGLEWVSYISSSSSTIYYADSVKGRFTISRDNAKNSLYLQMNSLRAEDTAVYYCARGGLQHWGQGTLVTVSS

SEQ ID NO: 26887 - protein, 94 aa, Homo sapiens
AASGFTFNNYWMTWVRQAPGKGLEWVANIKQDGSEKYYVDSVKGRFTISGDNAKNSLYLQMNSLRAEDTAVYYCARGRATFDPWGQGTLVTVSS

SEQ ID NO: 26888 - protein, 94 aa, Homo sapiens
AASGFIFSTFGMSWVRQAPGKGLEWVANIKKDGSEKYYVDSVKGRFTISRDNAKNSLYLQMDSLRAEDTAVYYCARGRATFDPWGQGTLVTVSS

SEQ ID NO: 26889 - protein, 91 aa, Homo sapiens
AASGFTFSSYEMNWVRQAPGEGLQWVSYISSSGSAIYYADSVKGRFTISRDNAKNSLFLQMNSLRAEDTAVYYCVRTFDSWGQGILVTVSS

SEQ ID NO: 26890 - protein, 91 aa, Homo sapiens
AASGFSFSSYEMNWVRQAPGKGLEWVSYISSSGSTMYYSDSVKGRFTISRDNAKRSLYLQMNSLRAEDTAVYYCVRTFDSWGQGTLVIVSS

SEQ ID NO: 26891 - protein, 93 aa, Homo sapiens
AASGFTFSTTAMSWVRQAPGMRPEWVSFINGDDTKRYYADSVKGRFIISREISNNTLYLQMNSLRVEDTAVYYCVKEGGFDPWGQGTLVTVSS

SEQ ID NO: 26892 - protein, 93 aa, Homo sapiens
AASGFTFYNHVMSWVRQTPERGLEWVSVIYPGGNNAYYGDSVKGRFTVSRDDSKNTLYLQMNSLRVEDTAVYYCVKEGGFDPWGQGTLVAVSS

SEQ ID NO: 26893 - protein, 93 aa, Homo sapiens
AASGFTFSSYWMIWVRQAPGKGLEWVANIKQDGSEKNYVDSVKGRFTISRDNAKNSLYLQMNSLRAEDTAVYFCVRGGGMDVWGQGTTVTVSS

SEQ ID NO: 26894 - protein, 93 aa, Homo sapiens
AASGFTFSTYWMTWVRQAPGKGLEWVANMKEDGSEKYYVDSVKGRFTISRDNAKNSLDLQMNSLRAEDTAVYYCVRGGGMDVWGEGTTVTVSS

SEQ ID NO: 26895 - protein, 93 aa, Homo sapiens
AASGFTFSTYWMTWVRQAPGKGLEWVANMKEDGSEKYYVDSVKGRFSISRDNAKNSLDLQMNSLRAEDTAVYYCVRGGGMDVWGEGTTVTVSS

SEQ ID NO: 26896 - protein, 97 aa, Homo sapiens
SVSGGSISSSTYYWGWIRQPPGKGLEWIGSIYYSGNTYYNPSLKSRATISVDTSKNQFSLILNSVTAAETAVYYCARHQWRNWFDPWGQGTLVTVSS

SEQ ID NO: 26897 - protein, 97 aa, Homo sapiens
TVSGGSISGSIYYWGWIRQPPGKGLEWIGSIYYSGSTDYNPSLKSRVTISVDTSKNHFSLKLSSVTAADTAVYYCARHQWRNWFDPWGQGTLVTVSS

SEQ ID NO: 26898 - protein, 97 aa, Homo sapiens
TVSGGSISGSIYYWGWIRQPPGKGLEWIGSIYYSGSTDYNPSLKSRVTISVDTSKNHFSLKMSSVTAADTAVYYCARHQWRNWFDPWGQGTLVTVSS

SEQ ID NO: 26899 - protein, 97 aa, Homo sapiens; identical to SEQ ID NO: 26898

SEQ ID NO: 26900 - protein, 94 aa, Homo sapiens
AASGFTLSSYWMQWVRQAPGKGLVWVSHINSGGSYTSYADSVKGRFTISRDNTKNTVYLQMNSLRAEDTAVYYCVRDNSGLDYWGQGTLVTVSS

SEQ ID NO: 26901 - protein, 94 aa, Homo sapiens
AASGFTFSSYWMHWVRQAPGKGLVWVSHINSDGSSTNYADSVKGRFTISRDNAKNTLYLQMNSLRAEDTAVYYCVRDNSGLDYWGQGTLVTVSS

SEQ ID NO: 26902 - protein, 94 aa, Homo sapiens
ASGFRFNLFWMSWVRQAPGKGLEWVASIKYDGSDKEYVASVKGRFSLSRDNAKNSVFLQMNSLRVEDTAVYYCARGGGHDHDYWGPGSLVTVSS

SEQ ID NO: 26903 - protein, 95 aa, Homo sapiens
AASGFTFRNYWMTWVRQAPGKGLEWAASIKYDGSERYYVDSVKGRFTISRDNGKNSVSLQMNSVRVEDTAVYYCARGGGHDHDYWGQGILVTVSS

SEQ ID NO: 26904 - protein, 98 aa, Homo sapiens
AASGFTFSSYSMNWVRQAPGKGLEWVSYISNSGNTIDYADSVKGRFTISRDNAKNSLSLQMNSLRDEDSAVYYCARARGYSYGYSDFWGQGTLVSVSS

SEQ ID NO: 26905 - protein, 98 aa, Homo sapiens
AASGFTFSSYSMNWVRQAPGKGLEWVSYISSSGNTVDYADSVKGRFTISRDNAKNSLFLQVNSLRADDTAVYYCARARGYSYGYSDFWGQGTLVTVSS

SEQ ID NO: 26906 - protein, 95 aa, Homo sapiens
AASGFTFSTYWMSWVRQAPGKGLEWVANIKQDGSEMYYVDSVKGRFTISRDNAKNSLYLQMNSLRAEDTAVYYCARGSGSWYLYWGQGTLVTVSS

SEQ ID NO: 26907 - protein, 95 aa, Homo sapiens
AASGFTFSSYWMSWVRQAPGKGLEWVANIKQDGSEKYYVDSVKGRFTISRDNAKSSLYLQMNSLRAEDTAVYHCARGSGSWYLYWGQGTLVTVSS

SEQ ID NO: 26908 - protein, 93 aa, Homo sapiens
AASGFTFSNYWMSWVRQAPGKGLEWVANINQDGGEKYYVDSVKGRFTISRDNAKNSLYLQMNSLRGEDTAVYYCARGRAHEYWGQGTLVTVSS

SEQ ID NO: 26909 - protein, 93 aa, Homo sapiens
AASGFTFSNHWMSWVRQAPGKGLEWVANINHDGSEKYCVDSVKGRFTISRDNAKNSLYLQTSSLRAEDTAVYSCARGRAHEYWGQGTLVTVSS

SEQ ID NO: 26910 - protein, 97 aa, Homo sapiens
AVSGFTFSTYWMSWVRQAPGKGLEWVANIKNDGSEKYYLDSVKGRFTISRDNAKNSLYLQMNNLRAEDTAVYYCARLNSGTYSFDYWGQGTLVTVSS

SEQ ID NO: 26911 - protein, 97 aa, Homo sapiens
APAGFTFTTYWMSWVRQAPGKGLEWVANIKNDGSEKYYVDSVKGRFTISRDNAKNSLYLQMNSLRAEDTAVYYCARLNSGTYSFDYWGQGTLLTVSS

SEQ ID NO: 26912 - protein, 98 aa, Homo sapiens
AASGFTFNSYLMHWVRQAPGKGLVWVSRINSDGSGTNYADSVKGRFTISRDNAKNTLYLQMNSLRAEDTAVYYCARRLSSYYYGMDVWGQGTTVTVSS

SEQ ID NO: 26913 - protein, 98 aa, Homo sapiens
AASGFTFSSYWMHWVRQVPGKGLVWVSRINSDGSSTHYADSVKGRFTISRDNAKNTLYLQMNSLRAEDTAVYYCARRLSSYYYGMDVWGHGTTVTVSS

SEQ ID NO: 26914 - protein, 95 aa, Homo sapiens
AASGFTVSINYMSWVRQAPGKGLEWVSVFYSGGSTYYADSVKGRFTISRDNSKNTLYLQMNSLRAEDTAVYYCARVGGSWYFDLWGRGTLVTVSS

SEQ ID NO: 26915 - protein, 95 aa, Homo sapiens
AASGFTVSSNYMSWVRQAPGKGLEWVSVIYSGESTYYADSVRGRFTISRDNSKKTLHLQMNSLRAEDTAVYYCARVGGSWYFDLWGRGTLVTVSS

SEQ ID NO: 26916 - protein, 97 aa, Homo sapiens
ASGYLFFTYGISWVRQAPGQGLEWMGWINTHNGQPIYAQTLQGRVTMTTDTSTSTTYMELRSLRSDDTAVYYCARDKGGAPDTFDIWGQGTMVTVSS

SEQ ID NO: 26917 - protein, 98 aa, Homo sapiens
ASGYTFINYGISWVRQAPGQGLEWMGWINTADNGDTHYAQKLQGRVTMTTDTSTSTVYMELRSLRSDDTAVYYCARDKGGAPDTFDIWGRGTVVIVSS

SEQ ID NO: 26918 - protein, 96 aa, Homo sapiens
TVSGGSINGYYWSWIRQPPGKGLEWIAYIFYSGTTSYSPSLKGRVTISVDTSKNQFSLKLSSVTAADTAFYYCARHYTSGWDFDYWGQGTLVTVSS

SEQ ID NO: 26919 - protein, 96 aa, Homo sapiens
TVSGGSISGYYWSWIRQPPGKGLEWIGYIFHSGSTSYSPSLKGRVTMSVDTSKNQFSLKLSSVTAADTAVYYCARHYTSGWDFDYWGQGTLVTVSS

SEQ ID NO: 26920 - protein, 96 aa, Homo sapiens
TVSGGPISGYYWSWIRQPPGKGLEWIGYIFSSGSTSYNPSLKSRVTISVDTSKNQFSLKLSSMTAADTAVYYCARHYTSGWDFDYWGQGTLVTVSS

SEQ ID NO: 26921 - protein, 100 aa, Homo sapiens
AASGFTFSDHNMDWVRQAPGKGLEWVGRTRKKANNYTTEYAASVKGRFTISRDDSKNSLYLQMNSLKSEDTAVYYCTRGRRDYYYGMDVWGQGTTVTVSS

SEQ ID NO: 26922 - protein, 100 aa, Homo sapiens
AASGFTFSDHHMDWVRQAPGKGLEWVGRTKNKANSYTTEYAASVKGRFTISRDDSKTSLYLQMNSLMTEDTAVYYCTRGRRDYYYGMDVWGQGTTVTVSS

SEQ ID NO: 26923 - protein, 97 aa, Homo sapiens
AASGFTFSSYWMSWVRQTPEKGLEWVANINQDGSEKYYVDSVKGRLTISRDNAKNSLYLQMNSLRAEDTAVYFCARGWIQLWPLDNWGQGTLVTVSS

SEQ ID NO: 26924 - protein, 97 aa, Homo sapiens
AASGFTFSDYWMNWVRQAPGKGLEWVASIKQDGSEKYYVDSVKGRFTISRDNAKNSLYLQMSSLRAEDTAVYYCARGWIQLWPLDNWGQGTLVTVSS

SEQ ID NO: 26925 - protein, 99 aa, Homo sapiens
AGSGFTFTNAWMTWVRQAPGKGLEWVGRIKSNADGGTRDYAAPVKGRFTISRDDSKNTLYLQMNSLKAEDTAVYYCTTVSGYYGAFDHWGQGTLVTVSS

SEQ ID NO: 26926 - protein, 99 aa, Homo sapiens
AGSGFTFSNAWMTWVRQAPGKGLEWVGRIKSKGDGGTADYAAPVKGRFTISSDDSKNTLYLQMNSLKTEDTAVYYCTTVSGYYGAFDHWGQGTLVTVSS

SEQ ID NO: 26927 - protein, 99 aa, Homo sapiens
AASGFTFNSYTMHWVRQSPGRGLEWVALISYDGTNQYYADSVKGRFTIFRDNSNNTLYLQMNSLRTEDTAVYYCARSRGGNYRDAFDIWGRGTMVTVSS

SEQ ID NO: 26928 - protein, 99 aa, Homo sapiens
AASGFSFSGYAIHWVRQAPGKGLEWLAVISFDGENKYYADSVKGRFTVSRDNSQNTLFLQMNSLRAEDTAVFYCARSRGGNYRDAFDIWGQGTMVSVSS

SEQ ID NO: 26929 - protein, 92 aa, Homo sapiens
AASGFIFSSADMSWVRQAPGQGLEWVSIIYHIPGVTYYADSVKGRFTISRDDSKNTLYLQMNSLRAEDTAIYYCAWGWGASWGQGTLVTVSS

SEQ ID NO: 26930 - protein, 92 aa, Homo sapiens
AASGFNFVDGDMIWVRQAPGKGLEWVSVIYHDDTGTYYADSVKGRFTTSRDNSKNTLYLQMDSLRVEDTAVYYCAWGWGASWGQGTPVTVSS

SEQ ID NO: 26931 - protein, 102 aa, Homo sapiens
AVYGGSFSGYSWSWIRQPPGKGLEWIGEINHSGSTSYNPSLKSRVTISVDTSKNQFSLKVNSVTAADTSVYYCARGWVGSYIYYYYYGMDVWGQGTTVTVSS

SEQ ID NO: 26932 - protein, 101 aa, Homo sapiens
AVYGGSFSGYYWSWIRQPPGKGLEWIGEINHSGSTSYNPSLKSRVTISEDTSKNQFSLKLTSVTAADTAVYYCARGWVGSYIYYYYYGMDVWGQGTTVTVS

SEQ ID NO: 26933 - protein, 97 aa, Homo sapiens
AASGFTFSSYSMSWVRQAPGKGLEWVANIKEDGSEKYYVDSVKGRFTISRDNAKNSLYLQMISLRVEDTAVYYCARGYGPGGCLEYWGQGTLVTVSS

SEQ ID NO: 26934 - protein, 97 aa, Homo sapiens
AASGFTFSRYWMSWVRQAPGKGLEWVANTKEDGSVKYYVDSVKGRFTISRDNAENLLFLQMNSLRAEDTAVYYCARGYGPGGCLEYWGQGTLVTVSS

SEQ ID NO: 26935 - protein, 101 aa, Homo sapiens
AASGFTFNTYWMHWVRQGPGKGLVWVSRINSDGDSTTYADSVKGRVTISRDNAKNTLYLQMNSLRADDTAVYYCVRDLRKDYYHYYGMDVWGQGTSVTVSS

SEQ ID NO: 26936 - protein, 101 aa, Homo sapiens
AASGFTFNTYWMHWVRQAPGKGLVWVSRINSDGDTTNYADSVKGRFTISRDNAKNTLYLQMNSLRAEDTAVYYCVRDLRKDYYHYYGMDVWGQGTTVTVSS

SEQ ID NO: 26937 - protein, 96 aa, Homo sapiens
TVSGDSVSSYYWSWIRQPPGKGLEWIAYTHYSGSTNHNPSLKSRVTISIDTSKNHFSLMLSSMTAADTAVYYCARGGYGGYDFDNWGQGTLVTVSS

SEQ ID NO: 26938 - protein, 96 aa, Homo sapiens
TVSGDSIKSYYWSWIRQPPGKGLEWIGYMHYSGTTNNNPSLKSRVTISVDTSKNQFSLKLSSVTAADTAVYYCARGGYGGYDFDNWGQGTLVTVPS

SEQ ID NO: 26939 - protein, 99 aa, Homo sapiens
KGSGYSFPNYWIGWVRQMPGKGLEWMGIIYPLDSDTRYSPSFQGQVTISADKSISTAYLQWSSLKASDTAMYYCARQSCSGGSCPIDYWGQGTLVTVSS

SEQ ID NO: 26940 - protein, 98 aa, Homo sapiens
GSGFSFPNYWIVWVRQMPGKGLEWMGLIYPGDSDTRYSPSFQGQVTISADKSISSAFLQWSSLKASDTAMYYCARQSCSGGSCPIDYWGQGTLVTVSS

SEQ ID NO: 26941 - protein, 94 aa, Homo sapiens
GASGFTFSSYAITWVRQAPGQGLEWISVIYNDQTTVFYADSVKGRFTISRDDSKNTVYLQMNSLRVEDTALYYCVKGRDYGHYWGQGTLVTVSS

SEQ ID NO: 26942 - protein, 93 aa, Homo sapiens
ASGFDFSSYAMTWVRQAPGKGLEWVSVFYNDESTTYYGDSVKGRFTISRDNSKNTLYLQMNSLTADDTAVYYCVKGRDYGHYWGQGILVTVSS

SEQ ID NO: 26943 - protein, 96 aa, Homo sapiens
TVSGASITSFYWSWIRQPPGKGLEWIGYIDYSGSTNYNPSLKSRVTISADTPKNQFSLKLSSVTAADTAVYYCARRYSSGWLFDFWGQGTLVTVSS

SEQ ID NO: 26944 - protein, 96 aa, Homo sapiens
TVSGGSISSYYWSWFRQPPGKRLEWIGYIYDSGSTNYNPSLKSRVTISVDTSKNQFSLRLSSVTPADTAVYYCARRYSSGWLFDFWGQGTLVTVSS

SEQ ID NO: 26945 - protein, 93 aa, Homo sapiens
EASGFTFNTYAMSWVRQAPGKGLECVSVIYSGGTITYYADSVKGRFTISRDNSKNTLYLQMNSLRAEDTAVYYCAKAAVPDYWGQGILVTVSS

SEQ ID NO: 26946 - protein, 93 aa, Homo sapiens
AASGFTFSSYDMSWVRQAPGKGLEWVSSMSGSAGSTYYADSVKGRFTISRDNSKNTLYLEMNNLRAEDTAVYYCAKAAVPDYWGQGTLVTVSS

SEQ ID NO: 26947 - protein, 92 aa, Homo sapiens
ASGYTFTSYGINWVRQAPGQGLEWMGWISAYNGYTNYAQKLQGRVTMTTDTSTSTAYMDLRSLRSDDTAVYYCARDHYMDVWGEGTTVTVSS

SEQ ID NO: 26948 - protein, 92 aa, Homo sapiens; identical to SEQ ID NO: 26947

SEQ ID NO: 26949 - protein, 92 aa, Homo sapiens
ASGYTFTSYSITWVRQAPGQGLEWMGWISAYNGNTNYAQKFQGRVTMTTDTSTSTAYMELRSLRSDDTAVYYCARDHYMDVWGKGTTVTVSS

SEQ ID NO: 26950 - protein, 91 aa, Homo sapiens
ASGFILSTSDMSWVRQAPGKGLEWISYIVHGGTSTYSADSVKGRFTISRDSAKNSLYLQMNSLTDEDTGVYYCVRGHMDVWGKGTTVTVSS

SEQ ID NO: 26951 - protein, 91 aa, Homo sapiens
ASGFILSTSDMSWVRQAPGKGLEWISYISGSGTSTYYADSVKGRFTISRDSAKNSLYLQMNSLTDEDTGVYYCVRGHMDVWGKGTTVTVSS

SEQ ID NO: 26952 - protein, 92 aa, Homo sapiens
EASGFIVTTYDMSWFRQAAGKGLEWISYISGAAGATYYAASVRGRFTISRDTAKNSLDLQMNGLTDGDTGLYYCVRGHMDVWGRGTTVTVSS

SEQ ID NO: 26953 - protein, 91 aa, Homo sapiens; identical to SEQ ID NO: 26950

SEQ ID NO: 26954 - protein, 92 aa, Homo sapiens
AASGFTFNNVDMSWVRQAPGKRLEWISYISGRSGATYYADSVKGRFTISRDIARNSLHLQMNTLRAEDTAVYYCVRGHMDVWGQGTTVTVSS

SEQ ID NO: 26955 - protein, 92 aa, Homo sapiens
AASGFTFNNVDMSWVRQAPGKRLEWISYISGRSGATYYADSVKGRFTISRDIARNSLYLQMNTLRAEDTAVYYCVRGHMDVWGQGTTVTVSS

SEQ ID NO: 26956 - protein, 92 aa, Homo sapiens
AASGFTLNNVDMSWVRQAPGKRLEWISYISGRSGATYYADSVKGRFTISRDIARNALYLQMNTLRAEDTAVYYCVRGHMDVWGQGTTVTVSS

SEQ ID NO: 26957 - protein, 92 aa, Homo sapiens
AASGFTFNNVDMSWVRQAPGKRLEWISYISGASGATYYADSVKGRFTISRDIARNSLYLQMNNLRGDDTAVYYCVRGHMDVWGQGTTVTVSS

SEQ ID NO: 26958 - protein, 92 aa, Homo sapiens
AASGFSFNNVDMSWVRQAPGKRLEWISYISGRSGATYYADSVKGRFTISRDIARNSLYLQMHTLRAEDTAVYYCVRGHMDVWGLGTTVTVSS

SEQ ID NO: 26959 - protein, 92 aa, Homo sapiens
AAPGFGFSTSDMSWVRQASGKGLEWISYIAGRDGSVYYADSVKGRFTISRDNAKNSLYLQMNSLTDEDTGVYYCVRGHMAVWGTGTTVTVSS

SEQ ID NO: 26960 - protein, 92 aa, Homo sapiens
AASGLTLSNADLNWVRQAPGKRLEWISYISGRSGATHYADSVKGRFTISRDSARNSLHLQMNSLRGEDTAVYYCVRGHMAVWGQGTTVTVSS

SEQ ID NO: 26961 - protein, 95 aa, Homo sapiens
AVYSGSFSGYYWSWIRQPPGKGLEWIGEINHSGSTNYNPSLKSRVTISVDTSKNQFSLKLSSVTAADTAVYYCARGTSMVRGVYWGQGTLVTVSS

SEQ ID NO: 26962 - protein, 95 aa, Homo sapiens
AVYGGSFSGYYWSWIRQPPGKGLEWIGEINHSGSTNYNPSLKSRVTISVDTSKNQFSLRLTSVTAADTAVYYCARGTSMVRGVYWGQGTLVTVSS

SEQ ID NO: 26963 - protein, 94 aa, Homo sapiens
VYGGSFSGYYWSWIRQPPGKGLEWIGEINHSGSTNYNPSLKSRVTISVDTSKNQFSLKLNSVTAADTAVYYCARGTSMVRGVYWGQGTLVTVSS

SEQ ID NO: 26964 - protein, 95 aa, Homo sapiens
AVYGGSFSGYYWSWIRQPPGKGLEWIGEINHSGSTNYNPSLKSRVTISVDTSKNQFSLRLTSVTAADTAVYYCARGTSMVRGVYWSQGTLVTVSS

SEQ ID NO: 26965 - protein, 95 aa, Homo sapiens
AVNDGSFSGYYWSWIRQPPWKGLEWIGEINHSGSTNYNPSLKSRVTISVDTSKNQFSLNLTSVTAADTAVYYCARGTSMVRGVYWGQGTLVTVSS

SEQ ID NO: 26966 - protein, 94 aa, Homo sapiens
AVYSESFSGYYWSWIRQPPGKGLEWIGEINHSGSTNYNPSLKSRVTISVDTSKNQFSLKLSSVTAADTAVYYCARGTSMVRGVYWGQGTLVTVS

SEQ ID NO: 26967 - protein, 95 aa, Homo sapiens; identical to SEQ ID NO: 26962

SEQ ID NO: 26968 - protein, 95 aa, Homo sapiens
AVYGGSFSGYYWSWIRQPPGKGLEWIGEINHSGSINYNPSLKSRVTISVDTSKNQFSLKLSSVTAADTALYYCARGTSMVRGVYWGQGTLVTVSS

SEQ ID NO: 26969 - protein, 95 aa, Homo sapiens
AVDGGSFSGYHWSWIRQPPGKGLEWIGEINHSGSTNYNPSLKSRVTISVDTSKKQLSLKLTSVTAADTAVYYCARGTSMVRGVYWGQGTLVTVSS

SEQ ID NO: 26970 - protein, 90 aa, Homo sapiens
AASGFTFINYGIHWVRQAPGKGLEWVAVISYDGSNKYYADSVKGRFTISRDNSKNTLYLQMDSLRPEDTAVYYCSTFNYWGQGTLVTVSS

SEQ ID NO: 26971 - protein, 90 aa, Homo sapiens
AASGFTFTSYGIHWVRQAPGKGLEWVAVISYDGSNKYYADSVKGRFTISRDNSKNTLYLQMNSLRPEDTAVYYCSTFNYWGQGTLVTVSS

SEQ ID NO: 26972 - protein, 90 aa, Homo sapiens
AASGFTFTSYGIHWVRQAPGKGLERVAVISYDGSNKYYADSVKGRFTISRDNSKNTLYLQMNSLRPEDTAVYYCSTFNYWGQGTLVTVSS

SEQ ID NO: 26973 - protein, 90 aa, Homo sapiens
AASGFTFIEYGIHWVRQAPGKGLEWVAVISWDGSNKYYADSVKGRFTISRDNSKSTLYLQMNSLRAEDTAVYYCSTFNYWGQGTLVTVSS

SEQ ID NO: 26974 - protein, 99 aa, Homo sapiens
AASAFTFSNYAMNWVRQSPGKGLEWVAFIRGGGAGAQYADSVKGRFTISRDNSRNTLYLQMNSLRAEDTALYYCAKCAFSNGNDALDIWGQGTMVTVSS

SEQ ID NO: 26975 - protein, 99 aa, Homo sapiens
AASAFTFSNYAMNWVRQSPGKGLEWVAFIRGGGAGAQYADSVKGRFTISRDNSRNTLYLQMNSLRAEDTALYYCAKCAFSNGNDALDIRGQGTMVTVSS

SEQ ID NO: 26976 - protein, 99 aa, Homo sapiens
AASGFTFSNYAMTWVRQAPGKGLEWVSSVKGGGAGSQYADSVKGRFTISRDNSMDTLYLQMSSLRVEDTAVYYCAKCAFSNGNDALDIWGQGTMVTVSS

SEQ ID NO: 26977 - protein, 95 aa, Homo sapiens
AASGFTFSRYTMHWVRQVPGKGLVWVARIVGAGTSPSYADSVRGRFTISRDNAENTLYLQMSSLRDEDTAIYYCARSVEWGLDYWGQGALVTVSS

SEQ ID NO: 26978 - protein, 94 aa, Homo sapiens
AAFDFTFSSYTMHWVRQAPGGGLVWVSRISGDWQTSYADSVRGRFTISRDNARKTVSLEMNSLRAEDTAIYYCARSVEWGLDYWGQGTLVTVSS

SEQ ID NO: 26979 - protein, 96 aa, Homo sapiens
VASGFSLSSVGMSWVRQAPGKGLEWVSSISNNDGRTYYADSVEGRFTISRDNSKNIMYLQMNSLQAEDTAIYYCAKDRSGVAADYWGQGALVTVSS

SEQ ID NO: 26980 - protein, 96 aa, Homo sapiens
VASGFTLSSVGMSWVRQAPGKGLEWVSSISNSDGSTYYADSVKGRFTISRDNSKNTLYLQMNSLRAEDTAVYYCAKDRSGVAADYWGQGALVTVSS

SEQ ID NO: 26981 - protein, 96 aa, Homo sapiens
AASGFTFSDSGMSWVRQAPGKGLEFVSGISGSGLTTGYAASMRGRFTISRDNSKNTLSLQMNSLRAEDTAVYYCAKDRSGVAADYWGQGTLVTVSS

SEQ ID NO: 26982 - protein, 96 aa, Homo sapiens
AASGFTFSGSAIHWVRQASGKGLEWIGRIRSKGDNYATAYAAPVTGRFTISRDDSKNTSYLQMRSLKTEDTGVYFCTRPTVATNSWGQGTLVTVSS

SEQ ID NO: 26983 - protein, 96 aa, Homo sapiens
AASGFTFSGSPIHWVRQASGKGLEWVGRIRSKGDGYATAYAASVEGRFTISRDDSKNTAYLQMNRLKSEDTAVYYCTRPTVATNSWGQGTLVTVSS

SEQ ID NO: 26984 - protein, 96 aa, Homo sapiens
AASGFTFSGSAIHWVRQASGKGLEWVGRIRSKTDGYATAFAASVKGRFTISRDDSKNTSYLQMNSLKTEDTAVYYCTRPTVATNSWGQGTLVTVSS

SEQ ID NO: 26985 - protein, 96 aa, Homo sapiens
AASGFTFSGSPIHWVRQASGKGLEWIGRIRSKGDNHATAYSESLKGRFTISRDDSKSTAYLQMNSLKTEDTAVYYCTRPTVATNSWGQGTLVVVSS

SEQ ID NO: 26986 - protein, 91 aa, Homo sapiens
ASGYSFTTFWIGWVRQMAGKGLEWMGIIYPDDSDTMYSPSFQGQVTISVDKSTSTAFLQWRSLKASDTAIYFCARDSGGYWGQGTLVTVSS

SEQ ID NO: 26987 - protein, 91 aa, Homo sapiens
ASGYSFTTFWIGWVRQMAGKGLEWMAIIYPDDSDTMYSPSFQGQVTISVDKSTSTAYLQWSSLKASDTAMYFCARDSGGYWGQGTLVTVSS

SEQ ID NO: 26988 - protein, 92 aa, Homo sapiens
KVSGYSFSNYWIGWVRQMPGKGLEWMGIIYPGDYDTRYSPSFQGQVTISADKSMNTAYLQWSSLKASDTAMYYCARDSGGYWGQGTPVTVSS

SEQ ID NO: 26989 - protein, 91 aa, Homo sapiens
ASGYSFTTFWIGWVRQMAGKGLEWMGIIYPDDSDTMYSPSFQGQVTISVDKSTSTAYLQWSSLKASDTAMYFCARDSGGYWGQGTLVTVSS

SEQ ID NO: 26990 - protein, 90 aa, Homo sapiens
SGYSFTTYWIGWVRQMAGKGLEWMGIIYPDDSDTMYSPSFQGQVTISVDKSTSTAYLQWSSLKASDTAMYFCARDSGGYWGQGTLVTVSS

SEQ ID NO: 26991 - protein, 91 aa, Homo sapiens; identical to SEQ ID NO: 26987

SEQ ID NO: 26992 - protein, 92 aa, Homo sapiens
KASGYSFTNFWIGWVRQMPGKGLEWMGIIYPGDSDTRYSPSFQGQVTISADKSISTAYMQWNSLKVSDTAMYYCARDSGGYWGQGTLVTVSS

SEQ ID NO: 26993 - protein, 92 aa, Homo sapiens
KASGYSFANFWIGWVRQMPGKGLEWMGIIYPDDSDTRYSPSFQGQVTISADKSISTAYLQWSSLRASDTAMYYCARDSGGYWGRGTLVTVSS

SEQ ID NO: 26994 - protein, 94 aa, Homo sapiens
AASGFSLSNHWMSWVRQAPGKGPEWVADIKEDASEVNYVDSVKGRFTISRDNAKNSLFLQMNSLRVEDTAMYYCARMWNYEDYWGQGTLVTVSS

SEQ ID NO: 26995 - protein, 94 aa, Homo sapiens
AASGFTFSRHLMSWVRQAPGKGLEWVANINQDGSEKYYVDSVKGRFTISRDNARNSLYLQMNSLRAEDTALYYCARMWNYEDYWGRGTLVTVSS

SEQ ID NO: 26996 - protein, 98 aa, Homo sapiens
IFGDSVSSNSAAWNWIRQSPSRGLEWLGRTYYRSKWYNDYAVSVKSRITINPDTSKNQFSLQLNSVTPEDTAVYYCARGGTYRPFDYWGQGTLVTVSS

SEQ ID NO: 26997 - protein, 98 aa, Homo sapiens
ISGDSVSSNSAAWNWIRQSPSRGLEWLGRTYYRSKWYFDYAVSVKSRITVNPDTSKNQFSLQLNSVTPEDTAVYYCARGGTYRPFDYWGQGALVTVSS

SEQ ID NO: 26998 - protein, 98 aa, Homo sapiens
TVSGGSVSSVGDYWSWIRQRPGEGLEWIGNIYNSGLSWYTPSLESRFAISLDTSKNHFSLEVTSVTAADSAVYFCARDHSGYGYFDSWGPGTLVSVSS

SEQ ID NO: 26999 - protein, 98 aa, Homo sapiens
TVSGGSVSSVGDYWSWIRQRPGEGLEWIGNIYNSGLSWYTPSLESRSAISLDTSKNHFSLEVTSVTAADSAVYFCARDHSGYGYFDSWGPGTLVSVSS

SEQ ID NO: 27000 - protein, 98 aa, Homo sapiens
TVSSGSISSGGYYWSWIRQHPGKGLEWIGYIYYSGSTYYNPSLGSRVTISVDTSQNQFSLKLSTVTAADTAVYYCARDHSGYGYFDSWGQGTLVTVSS

SEQ ID NO: 27001 - protein, 92 aa, Homo sapiens
VVSGFTFSDYWMTWVRQAPGQGLEGVATIKHDASDKYYVESVKGRFTISRDNAKNLLYLQLNSLRADDTAIYYCATGDCASWGQGTLVTVSS

SEQ ID NO: 27002 - protein, 92 aa, Homo sapiens
AASGFTFSTFWMAWVRQVPGKGLEWVATLNHDGSEKYYVDSVKGRFTISKDNAKNSLFLQMNSLRVEDTAIYYCATGDCASWGQGTLVAVSS

SEQ ID NO: 27003 - protein, 92 aa, Homo sapiens
ASGYTFSSYAMHWVRQAPGQRLEWMGWIIAGNGNTKYSENFQGRVTITRDTSASTAYMELSSLRSEDTAVYYCATNWNYGYWGQGTLVTVSS

SEQ ID NO: 27004 - protein, 92 aa, Homo sapiens
ASGYTFTNYGIHWVRQAPGQRLEWMGWINAGNGNTKYSQKFQGRVTITRDTSASTAYMELSSLRSEDTAVYYCATNWNYGYWGQGTLVTVSS

SEQ ID NO: 27005 - protein, 97 aa, Homo sapiens
TVSGGSISTYYWSWIRQSPGKGLEWLGYIYYAGNTNYNPSLNGRVTISVDTSKSQFSLKLTSVTAADTAVYYCARAATTTVGWFDPWGQGTLVTVSS

SEQ ID NO: 27006 - protein, 97 aa, Homo sapiens
TVSGDSMSNYYWSWIRQSPGKGLEWIGYIYSAGNSHYNPSLKSRVTILMDTSKSQFSLKLTSVTAADTAVYYCARAATTTVGWFDPWGQGTLVTVSS

SEQ ID NO: 27007 - protein, 98 aa, Homo sapiens
AACGVTFDNYAMSWVRQAPGKGLEWISAVTSDGRTTWFADSVKGRFTISRDNSKNTVYLQMSSLRGEDTALYYCARDRRYPDDVFDIWGQGTPVTVSS

SEQ ID NO: 27008 - protein, 97 aa, Homo sapiens
AASGFTFNNYAMSWVRQAPGKGLEWVSAITASGGVTWYAGSVKGRFTISRDNSRNTVYLQMNSLRAEDTALYYCARDRRYPDDVFDIWGQGTMVTVS

SEQ ID NO: 27009 - protein, 94 aa, Homo sapiens
AASGFTFSKYGMTWVRQPPGKGLQWVANIKQDGSEKYYVDSVQGRFTISRDNAKNLLYLQMNSLRAEDTAVYYCARGRGWHDYWGLGTLVTVSS

SEQ ID NO: 27010 - protein, 94 aa, Homo sapiens
AASGFTFSRYGMTWVRQAPGKGLEWVANIKQDGSEKYYVDSVKGRFTISRDNAKNSLYLDMNSLRAEDTAVYVCARGRGWHDYWGQGTLVTVSS

SEQ ID NO: 27011 - protein, 94 aa, Homo sapiens
AASGFTFSRYGMTWVRQAPGKGLEWVANIKQDGSEKYYVDSVKGRFTISRDNAKNSLYLEMNSLRAEDTAVYVCARGRGWHDYWGQGTLVTVSS

SEQ ID NO: 27012 - protein, 96 aa, Homo sapiens
ATSGFTFSSYDMNWVRQAPGKGLEWLSFITKTSGTIYYADSVKSRFTISRDNAKNSLYLQMDSLRAEDTAAYYCVRDRDGGAFDIWGQGTMVTVSS

SEQ ID NO: 27013 - protein, 96 aa, Homo sapiens
AASGFTFSLYDMNWVRQAPGQGLEWLSFITKRSDTIYYADSVKGRFTISRDNVRNSLYLQMNSLRAEDTAVYFCVRDRDGGAFDIWGQGTMLTVSS

SEQ ID NO: 27014 - protein, 95 aa, Homo sapiens
AASGFTVSGNYMSWVRQAPGKGLEWVSVIYSGGSTYYADSVKGRFTISRDISKNTLYLQMNSLRAEDTAVYYCATTSITGTGDYWGQGTLVTVSS

SEQ ID NO: 27015 - protein, 95 aa, Homo sapiens
AASGFTVSSNYMSWVRQAPGKGLEWVSAIYSGGSTYYADSVKGRCTISRDNAKNTLYLQMNSLRAEDTAVYYCATTSITGTGDYWGQGTLVTVSS

SEQ ID NO: 27016 - protein, 93 aa, Homo sapiens
AASGFTFSASALSWVRQAPGKGLEWISAITPDGDTTYYADSVRGRFAISRDNSKNTLYLQMNSLRAEDTAVYYCATGGDYDNWGQGSLVTVSS

SEQ ID NO: 27017 - protein, 93 aa, Homo sapiens
AASRFTFSASALSWVRQAPGKGLEWISAITPDGDTTYYADSVRGRFAISRDNSKNTLYLQMNSLRAEDTAVYYCATGGDYDNWGQGSLVTVSS

SEQ ID NO: 27018 - protein, 93 aa, Homo sapiens
AASGFTFSNSALSWVRQAPGKGLQWVSAISSSGGNTYYADSVKGRFTISRDNSKSTLYLQMNSLRAEDTAVYYCATGGDYDNWGQGTLVTVSS

SEQ ID NO: 27019 - protein, 101 aa, Homo sapiens
AASGFTFSSYAMSWVRQAPGKGLEWVSAISDNASRTYYAGSVKGRFTISRDNSRNTMSLQMNSLRVEDTAVYYCAKESPYSRSREYYFDYWGQGILVTVSS

SEQ ID NO: 27020 - protein, 101 aa, Homo sapiens
AASGFTFSSYAMSWVRQAPGKGLEWVSAISGSGDTTYYADSVKGRFTISRDNSKNTLYLQMNSLRAEDTALYYCAKESPYSRSREYYFDYWGQGTLVPVSS

SEQ ID NO: 27021 - protein, 96 aa, Homo sapiens
AASGFSFRDSWMVWVRQAPGKGLEWLANLNQDGTTTNYVDSVKGRFTISRDNARNSVFLQMNSLRDEDTAMYYCVRDRAYSTFDYWGQGTLVTVSS

SEQ ID NO: 27022 - protein, 95 aa, Homo sapiens
ASGFSFRDSWMVWVRQAPGKGLEWLANLNQDGTTTNYVDAVKGRFTISRDNARNSVFLQMNSLRDEDTAMYYCVRDRAYSTFDYWGQGTLVTVSS

SEQ ID NO: 27023 - protein, 96 aa, Homo sapiens
AASGFTFSSSWMVWVRQAPGKALEWVANIHPDGSVTNYVDSVKGRFTISRDNAKNSLYLQMDSLRADDSAVYYCVRDRAYSTFDYWGQGALVTVSS

SEQ ID NO: 27024 - protein, 96 aa, Homo sapiens
KVSGNDFTSYWIAWVRQMPGKGLEWMGIIYPGDSDTRYSPSFQGQVTISADKSITTAYLQWSRLKASDTAMYYCARRVGNSKFDYWGQGTLVTVSS

SEQ ID NO: 27025 - protein, 96 aa, Homo sapiens
KGSGYSLTSYWIAWVRQMPGKGLEWMGIIYPGDSDTRYSPSFQGHVTISADKSITTAYLQWSSLKASDTAMYYCARRVGNSKFDYWGQGTLVTVSS

SEQ ID NO: 27026 - protein, 93 aa, Homo sapiens
AASGFTVSSNYMSWLRQAPGKGLEWVSMLYGDGTMHYLESTQGRFSISRDSSKNILYLQMTSLRAEDTAVYFCARWTGTYYDYWGQGTLVTVS

SEQ ID NO: 27027 - protein, 94 aa, Homo sapiens
AASEFTVIKNYMSWVRQAPGKGLEWVSIIYPSGDTYYLDSVKGRFTISRDNPKNTLYLQMNSLRSEDTAVYYCARWTGTYYDYWGQGTLVTASS

SEQ ID NO: 27028 - protein, 94 aa, Homo sapiens
AASGFSFGSSTMNWVRQAPGKGLEWVSYISGTSSTMYYADSVKGRFTISRDNAKNSLYLHMNSLRAEDTAIYYCARDGTPIDYWGQGTLVTVSS

SEQ ID NO: 27029 - protein, 94 aa, Homo sapiens
AASGFSFGSSTMNWVRQAPGKGLEWVSYISSTSSTMYYADSVKGRFTISRDNAKNSLYLHMNSLRAEDTAIYYCARDGTPIDYWGQGTLVTVSS

SEQ ID NO: 27030 - protein, 94 aa, Homo sapiens
AASGFNFRSYEMNWVRQAPGKGLEWVSYISSSSSIIYYADSVKGRFTTSRDNAKNSLYLHMNSLRAEDTAVYYCARDGTPIDYWGQGTLVTVSS

SEQ ID NO: 27031 - protein, 99 aa, Homo sapiens
AASGFTFSNYAMSWVRQAPGQGLEWVSSISGSGDSTNYGDSVKGRFTISRDNSKNTLYLHMNSLRVEDTALYYCAKDPLSWGTIYFDYWGQGILVTVSS

SEQ ID NO: 27032 - protein, 99 aa, Homo sapiens
AASGFIFNNYAMSWVRQAPGKGLEWVSSISNDGDYRKSADSVKGRFTISRDNSKDTLYLQMTSLRAEDTAVYYCAKDPLSWGTIYFDYWGQGILVTVAS

SEQ ID NO: 27033 - protein, 99 aa, Homo sapiens
ISGDRVSSDTAAWDWIRQSPSRGLEWLGRTLFSSKWQFYYARSVEGRSRINPDTSKNQFSLQLNSVTPDDTATYYCARRGDGNSYYDYWGQGILVVVSS

SEQ ID NO: 27034 - protein, 99 aa, Homo sapiens
ISGDSVSADFMTWDWLRQSPSGGLEWLGRTRYASRWIGEYAPSMKSRLTIDVDTSKNQFSLKLKSVTPEDTAKYYCARRGDGNSYYDYWGQGALVIVSS

SEQ ID NO: 27035 - protein, 97 aa, Homo sapiens
SGYTFTTSYLHWVRQAPGQGLEWMGIIKPGDGSTNYAPKFQGRVTMTRDTSTSSVYMELSSLRSDDTAVYYCARRDCTGSSCYFVYWGQGTLVTVSS

SEQ ID NO: 27036 - protein, 98 aa, Homo sapiens
ASGYMFTSYYVHWVRQAPGQGLEWMGIINPTADSTNYAQKFQGRVTMTRDTSTSTVYMELSSLTSEDTALYFCARRDCTGSSCYFVYWGQGTLVTVSS

SEQ ID NO: 27037 - protein, 98 aa, Homo sapiens
AAEFTFSNYWVTWVRQAPGKGLEWVASIKQDGSEIYYVDSVRGRYTISRDNARNSLYLQMKYLRPEDTAVYYCARGTSGRYHAYFDYWGQGTQVTVSS

SEQ ID NO: 27038 - protein, 99 aa, Homo sapiens
AASEFTFSNYWMSWVRQAPGKGLEWVASIKQDESEKYYVDSVKGRFTISRDNAKNSLYLQMNSLRAEDTAVYYCARGTSGRYHAYFDYWGQGTLVTVSS

SEQ ID NO: 27039 - protein, 99 aa, Homo sapiens; identical to SEQ ID NO: 27038

SEQ ID NO: 27040 - protein, 106 aa, Homo sapiens
TQTLTLTCTFSGFSLITRGVGVAWIRQPPGKALEWLALIYWDDDNRYSPSLESRLTLTKDNSKNQVVLTMTNMDPLDTATYYCAHRLAAAGEFDYWGPGVLVTVSS

SEQ ID NO: 27041 - protein, 106 aa, Homo sapiens
TQTLTLTCTFSGFSLSTSGVGVGWIRQPPGKALEWLAIIYWDDDNRFSPSLKSRLTLSKDTSKNQVVLTMTSVDPVDTATYYCAHRLAAAGEFDYWGQGILVTVSS

SEQ ID NO: 27042 - protein, 106 aa, Homo sapiens
TQTLTLTCTFSGFSLSTYGVGVHWIRQPPGKALEWLALIYWDDDKRYSPSLKSRLTITKDTSKHQVVLTMTNMDPVDTATYFCAHRLAAAGEFDYWGQGTLVTVSS

SEQ ID NO: 27043 - protein, 96 aa, Homo sapiens
ASGYTFGTYAIHWVRQAPGQRLEWMGWIIPGNGLTKYSQTFQHRVTVSSDTSANTAYMELFSLKSEDTAVYYCARDSPGLRSFDYWGQGTRVTVSS

SEQ ID NO: 27044 - protein, 96 aa, Homo sapiens
ASGYTFTNYAIHWVRQAPGQRLEWMGWVNGGSGDTRYSQSFQGRVTMTRDTSATTVYMELSSLRSEDTAVYYCARDSPGLRSFDYWGQGTLVTVSS

SEQ ID NO: 27045 - protein, 96 aa, Homo sapiens
ASGYTFTNYAVHWVRQAPGQRFEWMVWVNPGNGDTRYSQNFQGRVTMTRDTSATTVYLELSSLTSEDTAVYYCARDSPGLRSFDYWGQGTLVTVSS

SEQ ID NO: 27046 - protein, 96 aa, Homo sapiens
ASGYTFNNIAIHWVRQAPGQRLEWMGWVYGGSGDRRYSQTFQDRVTMTRDTSATTVYMELSSLTSEDTAVYYCARDSPGLRSFDYWGQGTLVTVSS

SEQ ID NO: 27047 - protein, 96 aa, Homo sapiens
AASGFTFTTHAMGWVRQAPGKGLEWVSIITADGRTYYANSVRGRVTISRDTSKNTLFLQMIDLRAEDTAVYFCAKGGIEARLSDYWGQGTLLTVSS

SEQ ID NO: 27048 - protein, 97 aa, Homo sapiens
AGSGFTFSCCTMGWVRQAPGKGLEWVSTISDSGVTTYYADSVKGRFTISRDNSKNTLSLQMNSLTTEDTAVYFCAKGGIEARLSDYWGQGAQVTVSS

SEQ ID NO: 27049 - protein, 92 aa, Homo sapiens
AASGFTFSYYAMNWVRQTPGKGLEWVSSTSGTGLTYADSVKGRFTISRDDSKNTLYLQMSSLRVEDTAIYYCVKGKYLVDCWGQGTLVTVSS

SEQ ID NO: 27050 - protein, 92 aa, Homo sapiens
AASGFTFSYYAMKWVRQTPGKGLEWVSSIGGSGVTYADSVKGRFTISRDDSKNMLYLQMSSLRVEDTAIYYCVKGKYLVDCWGQGTLVTVSS

SEQ ID NO: 27051 - protein, 92 aa, Homo sapiens
AASGFKFSDYAMSWVRQAPGKGLEWVSNIAGDGTRYADSVKGRFTISRDNSNNMLYLQMASLRVDDTAVYYCVKGKYLVDCWGQGTLVTVSS

SEQ ID NO: 27052 - protein, 94 aa, Homo sapiens
AASGYSFSSHWIHWVRQGPGKGLVWVSQINYDGSTTTYADSVKGRFTISRDNAKNTLYLQMNSLRVEDTAVYYCTTVAEGLGYWGQGTLVTVSS

SEQ ID NO: 27053 - protein, 93 aa, Homo sapiens
AASGFTFSKYWMHWVRQAPGKGLVWVSHINRDGITTYADSVKGRFTISRDNAKNTLNLQMNSLRVEDTAMYYCTTVAEGLGYWGQGTLVAVSS

SEQ ID NO: 27054 - protein, 93 aa, Homo sapiens; identical to SEQ ID NO: 27053

SEQ ID NO: 27055 - protein, 96 aa, Homo sapiens
EASGFTFHRYDMHWVRQTPGKGLEWVAYISEDGSTRDYTDSVKGRFTVSRDNAKNTLYLEVSNLRPNDTATYYCARAPRWNGFDYWGQGTLVIVSS

SEQ ID NO: 27056 - protein, 96 aa, Homo sapiens
EASGFTFSLYDLHWVRQAPGKGLEWVAFISQYGDTELYADSVKGRFTISRDNSQNTLYLQINSPRPDDTASYFCARAPRWNGFDYWGRGTLVIVSS

SEQ ID NO: 27057 - protein, 96 aa, Homo sapiens
EASGFTFSLYDLHWVRQAPGKGLEWVAFFSQYGDTELYADSVKGRFTISRDNSQNTLYLQINSPRPDDTASYFCARAPRWNGFDYWGRGTLVIVSS

SEQ ID NO: 27058 - protein, 93 aa, Homo sapiens
AASGFTFSNYWMSWVRQAPGKGLEWVANIKQDGSEKYYVDSVKGRFTISRDNGKNSLYLQMNSLRAEDTAVYYCARGGSYYFWGQGTLVTVSS

SEQ ID NO: 27059 - protein, 93 aa, Homo sapiens
AASGFTFSSYWMSWVRQAPGKGLEWVASIKQDGTETYYVDSVKGRFTISRDNAKDSLYLQMNSLRAEDTAVYYCARGGSYYFWGQGTLVTVSS

SEQ ID NO: 27060 - protein, 96 aa, Homo sapiens
TVSGGSISSYHWSWIRQPPGRGLEWIGYVSWSGSANYRPSLKSRVTISLDTSKNQFSLNLNSVTAADTAVYYCARVSDWGKWFDPWGQGTLVTVSS

SEQ ID NO: 27061 - protein, 105 aa, Homo sapiens
TISGGSIPTYYWTWVRQPPGKGLEWLGYIFDRGITSYNYERVRTNYSPSLKSRLTISLDTSKNQLSLTLTSVTAADTAVYYCARVSDWGKWFDPWGPGTLVTVSS

SEQ ID NO: 27062 - protein, 105 aa, Homo sapiens; identical to SEQ ID NO: 27061

SEQ ID NO: 27063 - protein, 105 aa, Homo sapiens
TISGGSIPTYYWTWVRQPPGKGLEWLGYIFDRGITSYNYERVRTNYSPFLKSRLTISLDTSKNQLSLTLTSVTAADTAVYYCARVSDWGKWFDPWGPGTLVTVSS

SEQ ID NO: 27064 - protein, 105 aa, Homo sapiens
TISGGSIPTYYWTWVRQPPGKGLEWLGYIFDRGITSYNYERVRTNYSPSPKSRLTISLDTSKNQLSLTLTSVTAADTAVYYCARVSDWGKWFDPWGPGTLVTVSS

SEQ ID NO: 27065 - protein, 94 aa, Homo sapiens
TVSGGSFIGYYWSWFRQTPGKGLEWIGYVHNTNGDTDSSPPLKSRVTISADASKSQFFLHLTSMTAADTALYFCARGRGWIDPWGPGILVSVSS

SEQ ID NO: 27066 - protein, 93 aa, Homo sapiens
TVSGASISSYYWSWFRQPPGKGLECIANIYYTGITNYNPSLKSRVTISVDTSKNQFSLKVSSVTAADTAVYYCARGRGWIDPWGQGILVTVSS

SEQ ID NO: 27067 - protein, 96 aa, Homo sapiens
AVYGGSFSGYYWSWIRQPPGKGLEWIGEINHSGSTNYNPSLKSRVTISVDTSKNQFSLNLNSVTAADTAVYYCARGVYGYDAFDIWGQGTMVTVSS

SEQ ID NO: 27068 - protein, 96 aa, Homo sapiens
AVYGGSFSGYYWSWIRQPPGKGLEWIGEINHSGSTNYNPSFKSRVTISVDTSKNQFSLKLSSVTAADTAVYYCARGVYGYDAFDIWGQGTMVTVSS

SEQ ID NO: 27069 - protein, 96 aa, Homo sapiens
ASGYTFYNYAIYWVRQAPGQRLEWLGWVTGGNGDTFYSQKLQGRVTITRDTSTTTAYMELSGLRSEDTAVYYCARDSPGRGGLDYWGQGTLVTVSS

SEQ ID NO: 27070 - protein, 96 aa, Homo sapiens
ASGYTFTNYAMYWVRQAPGQRLEWMGWVRGGNGATQYSERLQGRVTMTSDTTATTAYLEVSGLRSEDTAMYYCARDSPGRGGLDYWGQGTLVTVSS

SEQ ID NO: 27071 - protein, 95 aa, Homo sapiens
SAFTFTSYAIYWVRQAPGQRLEWMGWIAGGSGNRMYSQKFQGRLTLTRDTSASTAYMELSSLRSEDTAVYYCARDSPGRGGLDYWGQGTLVTVSS

SEQ ID NO: 27072 - protein, 93 aa, Homo sapiens
ATSGFTLSSYWMNWVRQAPGKGLEWVASIKSDGTDKFYLDAVKGRFIISRDNAQNSLYLQMNSLRAEDTAIYYCVRENQMAYWGLGTLVTVSS

SEQ ID NO: 27073 - protein, 93 aa, Homo sapiens
AASGFTFSNYWMSWVRQAPGKGLEWVANIKHDGSDKYYVDSVKGRFTISRDNAKNSLCLQMDSLRVEDTALYYCVRENQMAYWGQGTLVTVSS

SEQ ID NO: 27074 - protein, 95 aa, Homo sapiens
TVSGGSISSYYWSWIRQPPGKGLEWIGYIYYSGSTNYNPSLTSRVTISVDTSKNQFSLKLNSVTAADTAVYFCARGGVKWTFDSWGRGTLVSVSS

SEQ ID NO: 27075 - protein, 95 aa, Homo sapiens
TVSGGSITSYYWSWIRQPPGKGLEWLGYIYDTGTTSYNPSLKSRVTISVDTSKNQFSLGLTSVTAADTALYYCARGGVKWTFDSWGQGILVTVSS

SEQ ID NO: 27076 - protein, 92 aa, Homo sapiens
ATSGFTFSNYAMSWVRQAPGKGLEWVSAISRSGDVTYYADSVKGRFTISRDTPKSTLYLQMDSLTVGDTAIYYCTRDPPDVWGPGTTVTVSS

SEQ ID NO: 27077 - protein, 92 aa, Homo sapiens
AASGFTFSDYGMSWVRQAPGKGLEWVSTISGGGTRTYYADSVKGRFTISRDNSKNTLYVQMNSLRAEDTAVYYCTRDPPDVWGQGTTVTVSS

SEQ ID NO: 27078 - protein, 93 aa, Homo sapiens
EASGFTFRNYLMTWVRQAPGKGLEWVANIKQDGGEKYYVDSVKGRFTISRDNAKNSLFLQMNSLRAEDTAEYYCARSGGLDVWGQGTTVTVSS

SEQ ID NO: 27079 - protein, 93 aa, Homo sapiens
AASEFTFRSYWMSWVRQAPGKGLEWVGKIKPDGSEKYYVDSVKGRFTISRDNAKNSLFLQMNSLRAEDTAVYYCARSGGLDVWGQGTTVTVSS

SEQ ID NO: 27080 - protein, 93 aa, Homo sapiens
AASGFSFSSYWMSWVRQAPGKGLEWVAKIKQDGSEKYYVDSVKGRFTISRDNAQSSLYLQMNSLRAEDTAVYYCARSGGLDVWGEGTTATVSS

SEQ ID NO: 27081 - protein, 93 aa, Homo sapiens
AASGFTFSSYWMSWVRQAPEKGLEWVAKMRNDGSEKNYVDSVKGRFTISRDNAKSSLYLQMSSLRGEDTAVYYCARSGGLDVWGQGTTVTVSS

SEQ ID NO: 27082 - protein, 93 aa, Homo sapiens; identical to SEQ ID NO: 27081

SEQ ID NO: 27083 - protein, 90 aa, Homo sapiens
AASGITFRNYDMNWVRQAPGKGLEWISRISGSGDTTFYADSVKGRFAISRDNSKNTLHLQMNSLRAEDTAVYYCAGAWEWGQGTLVTVSS

SEQ ID NO: 27084 - protein, 90 aa, Homo sapiens
ADAGFSFSKYDMHWVRQTPGKGLEWLSEISGTGDRTQYADSVKGRFTISRDNSKNTLYLQMNSLRVEDTAVYFCAGAWEWGQGTLVTVSS

SEQ ID NO: 27085 - protein, 89 aa, Homo sapiens
ASGITFTNYDMNWVRQAPGKGLEWISRISGSGDTTFYADSVKGRFAISRDNSKNTLHLQMNSLRAEDTAVYYCAGAWEWGQGTLVTVSS

SEQ ID NO: 27086 - protein, 96 aa, Homo sapiens
TVSGASISGYYWSWIRQPPGKGLEWIGYIYYSDNTNYNPSLKSRVTMSIDTSKNQFSLKLNSVTAADTAVYYCARGGASSKYLDYWGQGTLVTVSS

SEQ ID NO: 27087 - protein, 96 aa, Homo sapiens
TVSGGSISSYYWSWIRQPPGEGLEWIGYIYSSGSTDYNPSLKGRVTMSVDTSKNQFSLKLSSVTAADTAVYYCARGGASSKYLDYWGQGTLVTVSS

SEQ ID NO: 27088 - protein, 100 aa, Homo sapiens
TVSGGSISGYCWSWIRQPPGKGLEWVGYVYYSGGTKYNNYNPSLNGRLTISADTSKNQFSLMLNSVTAADTAVYYCARTIIGGGPPADYWGQGTLVSVSS

SEQ ID NO: 27089 - protein, 100 aa, Homo sapiens
TVSGGSISGYCWSWIRQPPGKGLEWVGYVYYSGGTKYNNYNPSLNGRLTISADTSKNQFSLMLNSVTAADTAVYYCARTIIGGGPPADYWGQGTLVSVPS

SEQ ID NO: 27090 - protein, 96 aa, Homo sapiens
TVSGGSMSGYCWSWIRQSPGKGLDWIGYIYSEARNYSPSLKSRLTLSLDMANNQFSLRLTSVTAADTAVYYCARTIIGGGPPADYWGQGALVTVSS

SEQ ID NO: 27091 - protein, 96 aa, Homo sapiens; identical to SEQ ID NO: 27090

SEQ ID NO: 27092 - protein, 94 aa, Homo sapiens
AASGFTFNLYTMGWVRQAPGKGLEWVSAINSGLSTFYSDSVKGRFSISRDNSKTTLYVQMNSLRAEDTALYYCARRVEWAFDVWGQGTMVTVSS

SEQ ID NO: 27093 - protein, 95 aa, Homo sapiens
GASGFSFSAYTMGWVRHVPGKGLDWVSAILSGGQSTYYADSVRGRFTISRDNSKNTVDLLLSSLRPEDTAIYYCARRVEWAFDVWGRGTMVTVAS

SEQ ID NO: 27094 - protein, 103 aa, Homo sapiens
VASGFSFSNYSMTWVRQAPGKGPEWVSVFYSGFSHARGADYADSVKGRFTVSRDNSRNTLYLQMNSLRAEDTAVYYCAKLVTYNWDWDAFDVWGQGTVVTVSS

SEQ ID NO: 27095 - protein, 103 aa, Homo sapiens
VASGFSFSSYSMTWVRQAPGKGPEWVSVFYSGFSHARGADYADSVKGRFTVSRDNSKNTLYLQMNSLRAEDTAVYYCAKLVTYNWDWDAFDVWGQGTVVTVSS

SEQ ID NO: 27096 - protein, 103 aa, Homo sapiens; identical to SEQ ID NO: 27095

SEQ ID NO: 27097 - protein, 103 aa, Homo sapiens
VASGFSFSSYSMTWVRQAPGKGPEWVSVFYSGFSHARGADYADSVKGRFTVSRDNSRNTLYLQMNSLRAEDTAVYYCAKLVTYNWDWDAFDVWGQGTVVTVSS

SEQ ID NO: 27098 - protein, 103 aa, Homo sapiens; identical to SEQ ID NO: 27095

SEQ ID NO: 27099 - protein, 103 aa, Homo sapiens; identical to SEQ ID NO: 27095

SEQ ID NO: 27100 - protein, 103 aa, Homo sapiens; identical to SEQ ID NO: 27095

SEQ ID NO: 27101 - protein, 103 aa, Homo sapiens
VAPGFSFSSYSMTWVRQAPGKGPEWVSVFYSGFSHARGADYADSVKGRFTVSRDNSKNTLYLQMNSLRAEDTAVYYCAKLVTYNWDWDAFDVWGQGTVVTVSS

SEQ ID NO: 27102 - protein, 103 aa, Homo sapiens
VASGFSFSSYSMTWVRQAPGKGPEWVSVFYSGFSHARGADYADSVKGRFTVSRDNSKNTLHLQMNSLRAEDTAVYYCAKLVTYNWDWDAFDVWGQGTVVTVSS

SEQ ID NO: 27103 - protein, 103 aa, Homo sapiens; identical to SEQ ID NO: 27095

SEQ ID NO: 27104 - protein, 103 aa, Homo sapiens; identical to SEQ ID NO: 27095

SEQ ID NO: 27105 - protein, 103 aa, Homo sapiens; identical to SEQ ID NO: 27097

SEQ ID NO: 27106 - protein, 103 aa, Homo sapiens; identical to SEQ ID NO: 27095

SEQ ID NO: 27107 - protein, 103 aa, Homo sapiens; identical to SEQ ID NO: 27095

SEQ ID NO: 27108 - protein, 94 aa, Homo sapiens
ASGFTFSDYAMTWVRQTLGQGLEWVSSISETGGGRFYADSVKGRFTISRDDSKNTLYLQMNSLRADDTAIYYCVKDRLRNGDYWGQGTLVSVSS

SEQ ID NO: 27109 - protein, 95 aa, Homo sapiens
AASGFTFSTYAMTWVRQTPGMGLEWVASISGGGGGTFYAESVKGRFIISRDNSKNTLYLQMNSLRVDDTAVYYCVKDRLRNGDYWGQGTLVTASS

SEQ ID NO: 27110 - protein, 97 aa, Homo sapiens
GFTLSNSVMHWVRQAPGKGLEWAAVISEDGRHQNYADSVKGRFTFSRDNPKNTLFLQMNNLTPEDTAVYYCAKKGGGSGSYDYFDYWGQGALVTVSS

SEQ ID NO: 27111 - protein, 98 aa, Homo sapiens
AASGLTFSREVMHWVRQAPGKGLEWTAVISEDGTYQRQTDSVKGRFTVSKDNSKNTMDLQMNSLRPEDTAVYYCAKKGGGSGSYDYFDYWGQGTLVTV

SEQ ID NO: 27112 - protein, 98 aa, Homo sapiens
AASGLTFSREVMHWVRQAPGKGLEWTAVISEDGSYQRQTDSVKGRFTVSKDNSKNTMDLQMNSLRPEDTAVYYCAKKGGGSGSYDYFDYWGQGTLVTV

SEQ ID NO: 27113 - protein, 101 aa, Homo sapiens
SGFSGFNFSRHVMHWVRQAPGKGLEWMAVISEDGSYQRYRESVKGRFTFSRDNSKNTLSLQMNSLRPEDTAVYYCAKKGGGSGSYDYFDYWGQGALVIVSS

SEQ ID NO: 27114 - protein, 98 aa, Homo sapiens
AASGFTFSSQVMHWVRQAPGKGLEWTVVISEDGTYQRYTDSVKGRFTVSRDNSKNTIYLQMNSLRPEDTAVYYCAKKGGGSGSYDYFDYWGQGTLVTV

SEQ ID NO: 27115 - protein, 98 aa, Homo sapiens
AASGYAFGTHAMSWVRQAPGKGLEWVSLISASGTNTYYADSVKGRFTISRDVSKITLYLQMNSLRPEDTALYYCAKDVRGGGGGMDVWGQGTTVIVSS

SEQ ID NO: 27116 - protein, 98 aa, Homo sapiens
AASGLTFGTYAMSWVRQPPGKGLEWVSTISGSGYNTWYADSVKGRFTISRDISKNTVYLQMNSLRADDTAVYFCAKDVRGGGGGMDVWGLGTTVTVSS

SEQ ID NO: 27117 - protein, 98 aa, Homo sapiens
AASGLTFGTYAMSWVRQPPGKGLEWVSTISGSGYNTWYADSVKGRFTISRDISKNTVYLQMNSLRADDTAVYYCAKDVRGGGGGMDVWGLGTTVTVSS

SEQ ID NO: 27118 - protein, 98 aa, Homo sapiens
ATSGLTFGTYAMSWVRQPPGKGLEWVSLISGNGYNTWYADSVKGRFTISRDISKNTVYLQMNSLRADDTAEYYCAKDVRGGGGGMDVWGLGTTVTVTS

SEQ ID NO: 27119 - protein, 98 aa, Homo sapiens; identical to SEQ ID NO: 27117

SEQ ID NO: 27120 - protein, 98 aa, Homo sapiens
EASGFTFGTYAMSWVRQAPGKGLEWLSLISGSGVNTYYADSVKGRFTISRDITKNTLYLQMNTLRAEDTAVYYCAKDVRGGGGGMDVWGQGTTVTVAS

SEQ ID NO: 27121 - protein, 94 aa, Homo sapiens
ASGYTFTTCAMHWVRQAPGQRLEWMGWINAGNGNTKYSQKFQGRVTITRDTSASTAYMELSSLRSEDTAVYYCAKSSSDSFDYWGQGTLVTVSS

SEQ ID NO: 27122 - protein, 94 aa, Homo sapiens; identical to SEQ ID NO: 27121

SEQ ID NO: 27123 - protein, 97 aa, Homo sapiens
VSNGSISGNSWSWIRQAPGKGLEWIGYMSYTGYTNYNPSFKSRITISLDMSDSQFSLTLRSVTDTDTAIYYCARHSLSQTSSWFDPWGQGTLVTVSS

SEQ ID NO: 27124 - protein, 97 aa, Homo sapiens
VSNGTIGGSYWSWIRQPPGKGLEWIGYVSYTGYVRYNPSFKSRITISLDTSDSQFSLKLGSVTDTDSATYYCARHSLSQTSSWFDPWGQGTLVSVSS

SEQ ID NO: 27125 - protein, 97 aa, Homo sapiens
VSNGSISGNSWSWIRQAPGKGLEWIGYMSYTGYTNYNPSFKSRITFSLDMSDSQFSLTLRSVTDTDTAIYYCARHSLSQTSSWFDPWGRGTLVTVSS

SEQ ID NO: 27126 - protein, 96 aa, Homo sapiens
VSNGSISGNHWSWIRQPPGKGLEWIGYMSYTGYTKYNSSFKSRITISLDTSESQFSLKLRSVTDADSATYYCARHSLSQTSSWFDPWGQGTLVTVS

SEQ ID NO: 27127 - protein, 97 aa, Homo sapiens; identical to SEQ ID NO: 27125

SEQ ID NO: 27128 - protein, 97 aa, Homo sapiens
VSNGSISGNLWSWIRQAPGKGLEWIGYMSYTGYTNYNPSFKSRITISLDMSDSQFSLTLRSVTDTDTAIYYCARHSLSQTSSWFDPWGQGTLVTVSS

SEQ ID NO: 27129 - protein, 97 aa, Homo sapiens
VSNGSISGNSWSWIRQAPGKGLEWIGYMSYTGYTNYNPSFKGRITISLDMSDSHFSLTLRSVTDTDTAIYYCARHSLSQTSSWFDPWGQGTLVTVSS

SEQ ID NO: 27130 - protein, 97 aa, Homo sapiens
VSNGSISANSWSWIRQAPGKGLEWIGYMSYTGYTNYNPSFQSRITISLDMSDSQFSLTLRSVTDTDTAIYYCARHSLSQTSSWFDPWGQGTLVTVSS

SEQ ID NO: 27131 - protein, 96 aa, Homo sapiens
SNGSISGNSWSWIRQAPGKGLEWIGYMSYTGYTNYNPSFKSRITISLDMSDSQFSLTLRSVTDTDTAIYYCARHSLSQTSSWFDPWGQGTLVTVSS

SEQ ID NO: 27132 - protein, 97 aa, Homo sapiens
VSNGSISGNSWSWIRQAPGKGLEWIGYMSYTGYTNYNPSFKSRVSFSLDMSDSQFSLTLRSVTDTDTAIYYCARHSLSQTSSWFDPWGQGTLVTVSS

SEQ ID NO: 27133 - protein, 97 aa, Homo sapiens
VSNGSISGNSWSWIRQAPGKGLEWIGYMSYTGYTKYNPSFKSRITISLDMSDSQFSLTLRSVTDTDTAIYYCARHSLSQTSSWFDPWGQGTLVTVSS

SEQ ID NO: 27134 - protein, 97 aa, Homo sapiens
VSNGSISGNSWSWIRQAPGKGLEWIGYMSYTGYTKYNPSFKSRITFSLDMSDSQFSLTLRSVTDTDTAIYYCARHSLSQTSSWFDPWGQGTLVTVSS

SEQ ID NO: 27135 - protein, 97 aa, Homo sapiens
VSNGSVSGNYWSWIRQPPGKGLEWIGCMSYTGYTRYNSSFKSRVTISLDTSESQFSLRLTSVTDTDSAIYYCARHSLSQTSSWFDPWGQGSLVTVSS

SEQ ID NO: 27136 - protein, 96 aa, Homo sapiens
VSNGSISGNHWSWIRQPPGKGLEWIGYMSYTGYTKYNSSFKSRITISLDTSESQFSLKLRSVTDADSATYFCARHSLSQTSSWFDPWGRGTLVTVS

SEQ ID NO: 27137 - protein, 97 aa, Homo sapiens
VSNGSISGNSWSWIRQAPGKGLEWIGYMSYTGYTNYNPSFKSRITFSLDMSDSQFSLTLRSVTDTDTAIYYCARHSLSQTSSWFDPWGQGTLVTVSS

SEQ ID NO: 27138 - protein, 97 aa, Homo sapiens
VSNGSVSGNYWSWIRQPPGKGLEWIGCMSYTGYTKYNSSFKSRITISLDTSESQFSLRLTSVTDTDSAMYYCARHSLSQTSSWFDPWGQGTLVTVSS

SEQ ID NO: 27139 - protein, 96 aa, Homo sapiens
SNGSISGNSWSWIRRAPGKGLEWIGYMSYTGYTNYNPSFKSRITISLDMSDSQFSLTLRSVTDTDTAIYYCARHSLSQTSSWFDPWGQGTLVTVSS

SEQ ID NO: 27140 - protein, 95 aa, Homo sapiens
VSNGSISGNSWSWIRQAPGKGLEWIGYMSYTGYTNPSFKSRITFSLDMSDSQFSLTLRSVTDTDTAIYYCARHSLSQTSSWFDPWGRGTLVTASS

SEQ ID NO: 27141 - protein, 97 aa, Homo sapiens; identical to SEQ ID NO: 27124

SEQ ID NO: 27142 - protein, 96 aa, Homo sapiens
VSNGSINGNHWSWIRQPPGKGLEWIGYMSYTGYTKYNSSFKSRITISLDTSENQFSLKLKSVTDTDSATYYCARHSLSQTSSWFDPWGQGTLVTVS

SEQ ID NO: 27143 - protein, 97 aa, Homo sapiens; identical to SEQ ID NO: 27124

SEQ ID NO: 27144 - protein, 97 aa, Homo sapiens
VSNGSISGNSWSWIRQAPGKGLEWIGYMPYTGYTNYNPSFKSRITFSLDMSDSQFSLTLRSVTDTDTAIYYCARHSLSQTSSWFDPWGRGTLVTVSS

SEQ ID NO: 27145 - protein, 97 aa, Homo sapiens
VSNGTIGGSYWSWIRQPPGKGLEWIGYVSYTGYVRYNPSFKSRITTSLDTSDSQFSLKLGSVTDTDSATYYCARHSLSQTSSWFDPWGQGTLVSVSS

SEQ ID NO: 27146 - protein, 97 aa, Homo sapiens; identical to SEQ ID NO: 27128

SEQ ID NO: 27147 - protein, 97 aa, Homo sapiens
VSNGSISGNSWSWIRQAPGKGLEWIGYMSYAGYTNYNPSFKGRITISLDMSDSHFSLTLRSVTDTDTAIYYCARHSLSQTSSWFDPWGQGTLVTVSS

SEQ ID NO: 27148 - protein, 97 aa, Homo sapiens
VSNGTIGGSYWSWIRQPPGKGLEWIGCVSYTGYVRYNPSFKSRITISLDTSDSQFSLKLGSVTDTDSATYYCARHSLSQTSSWFDPWGQGTLVSVSS

SEQ ID NO: 27149 - protein, 97 aa, Homo sapiens; identical to SEQ ID NO: 27132

SEQ ID NO: 27150 - protein, 97 aa, Homo sapiens; identical to SEQ ID NO: 27124

SEQ ID NO: 27151 - protein, 97 aa, Homo sapiens
VSNGTVGGSYWSWIRQPPGKGLEWIGYVSYTGYVRYNPSFKSRITISLDTSDSQFSLKLGSVTDTDSATYYCARHSLSQTSSWFDPWGQGTLVSVSS

SEQ ID NO: 27152 - protein, 97 aa, Homo sapiens
VSNGTIGGSYWSWIRQPPGKGLEWIGYVSYTGYVRYNPSFKSRITISLDTSDGQFSLKLGSVTDTDSATYYCARHSLSQTSSWFDPWGQGTLVSVSS

SEQ ID NO: 27153 - protein, 94 aa, Homo sapiens
AVYGGSFSGYYWSWIRQPPGKGLEWIGEINDSRSTNYNPSLKSRVTISVDTSKNQFSLKLSSVTAADTAVYYCARKTEQLWQYWGQGTLVTVSS

SEQ ID NO: 27154 - protein, 93 aa, Homo sapiens
VYGGSFSGYYWSWIRQPPGKGLEWIGEINDSRSTNYNPSLKSRVTISVDTSKNQFSLKLSSVTAADTAVYYCARKTEQLWQYWGQGTLVTVSS

SEQ ID NO: 27155 - protein, 94 aa, Homo sapiens
AVYGGSFSGYYWSWIRQPPGKGLEWIGEINDSRSTNYNPSPKSRVTISVDTSKNQFSLKLSSVTAADTAVYYCARKTEQLWQYWGQGTLVTVSS

SEQ ID NO: 27156 - protein, 94 aa, Homo sapiens
AVYGGSFSGYYWSWIRQPPGKGLERIGEINDSRSTNYNPSLKSRVTISVDTSKNQFSLKLSSVTAADTAVYYCARKTEQLWQYWGQGTLVTVSS

SEQ ID NO: 27157 - protein, 94 aa, Homo sapiens
AVYGGSFSGYYWSWIRQPPGKGLEWIGEINHGGGTNYNPSLKSRVAISLATSKNQFSLKLNSVTAADTAVYYCARKTEQLWQYWGQGTLVTVSS

SEQ ID NO: 27158 - protein, 94 aa, Homo sapiens
AVYGGSFSGYYWSWIRQPPGKGLEWIGEINHSRRTNYNPSLKSRVTISVDTSKNQFSLKLSSVTAADTAVYYCARKTEQLWQYWGQGTLVTVSS

SEQ ID NO: 27159 - protein, 94 aa, Homo sapiens; identical to SEQ ID NO: 27153

SEQ ID NO: 27160 - protein, 94 aa, Homo sapiens; identical to SEQ ID NO: 27156

SEQ ID NO: 27161 - protein, 94 aa, Homo sapiens; identical to SEQ ID NO: 27153

SEQ ID NO: 27162 - protein, 101 aa, Homo sapiens
EASGFTISRYAMSWVRQPPGKGLEWVSIITGGGGTTYYADSVKGRFTISRDNYKNTLFLQMNGLRAEDTAIYYCAKNPTPDMTTSGWFDPWGQGTLVTVSS

SEQ ID NO: 27163 - protein, 101 aa, Homo sapiens
EPSGFTISRYAMSWVRQPPGKGLEWVSIITGGGGTTYYADSVKGRFTISRDNYKNTLFLQMNGLRAEDTAIYYCAKNPTPDMTTSGWFDPWGQGTLVTVSS

SEQ ID NO: 27164 - protein, 100 aa, Homo sapiens
ASGFTISRYAMSWVRQPPGKGLEWVSIITGGGGTTYYADSVKGRFTISRDNYKNTLFLQMNGLRAEDTAIYYCAKNPTPDMTTSGWFDPWGQGTLVTVSS

SEQ ID NO: 27165 - protein, 101 aa, Homo sapiens; identical to SEQ ID NO: 27162

SEQ ID NO: 27166 - protein, 101 aa, Homo sapiens
EASGFTISRYAMSWVRQPPGKGLEWVSTITGGGGTTYYADSVRGRFTISRDNYKNTVFLQMSGLRAADTAIYYCAKNPTPDMTTSGWFDPWGQGTLVTVSS

SEQ ID NO: 27167 - protein, 101 aa, Homo sapiens; identical to SEQ ID NO: 27162

SEQ ID NO: 27168 - protein, 101 aa, Homo sapiens; identical to SEQ ID NO: 27162

SEQ ID NO: 27169 - protein, 101 aa, Homo sapiens
GASGFTISRYAMSWVRQPPGKGLEWVSIITGGGGTTYYADSVKGRFTISRDNYKNTLFLQMNGLRAEDTAIYYCAKNPTPDMTTSGWFDPWGQGTLVTVSS

SEQ ID NO: 27170 - protein, 96 aa, Homo sapiens
AASTFTFADSWMSWVRQAPGKGLEWVANIKPDGSDQYYADSVKGRFTISRDNPSNSLYLQMKFLGAEDTALYYCARGGRTGTFDIWGLGTMVTVSS

SEQ ID NO: 27171 - protein, 96 aa, Homo sapiens
AASTFTFPDYWMGWVRQAPGKGLEWLANIKPDGSDQYYADSVAGRFTISRDNPNNSLFLQMKFLGAEDTALYYCARGGRTGTFDIWGLGTMVTVSS

SEQ ID NO: 27172 - protein, 95 aa, Homo sapiens
ASAFTLGDYWMSWVRQAPGKGLEWVANIKPDGSEKYYVDSVTGRFTISRDNPNNSLYLQMKFLGAEDTALYFCARGGRTGTFDIWGQGTMVIVSS

SEQ ID NO: 27173 - protein, 96 aa, Homo sapiens
AASTFTFADSWMSWVRQAPGKGLEWVANIKPDGSDQYYADSVKGRFTISRDNPSNSLYLQMKFLGAEDTALYYCARGGRTGTFDIWGLGTNGHRFF

SEQ ID NO: 27174 - protein, 95 aa, Homo sapiens
ASTLIFADSWMSWVRQAPGKGLEWVANIKPDGSEQYYADSVKGRFTISRDNPNKSLGLQMKFLGAEDTALYYCARGGRTGTFDIWGLGTMVIVSS

SEQ ID NO: 27175 - protein, 96 aa, Homo sapiens
AASTFTFADSWMSWVRQAPGKGLEWVANIKPDGSDQYYADSVKGRFTISRDNPSNSLYLQMKFLGAEDTALCYCARGGRTGTFDIWGLGTMVTVSS

SEQ ID NO: 27176 - protein, 96 aa, Homo sapiens
AASTFTFADSWMSWVRQAPGKGLEWVANIKPDGSDQYYADSVKGRFTISRDNPSNSLYLQMKFLGAEDTALYYCARGGRTGTFDIWGLETMVTVSS

SEQ ID NO: 27177 - protein, 96 aa, Homo sapiens
AASTFTFADSWMSWVRQAPGKGLEWVANIKPDGSDQYYTDSVKGRFTISRDNPSNSLYLQMKFLGAEDTALYYCARGGRTGTFDIWGLGTMVTVSS

SEQ ID NO: 27178 - protein, 96 aa, Homo sapiens
AASTFTFGDYWMSWVRQAPGKGLEWVANIKPDGSVQYSADSVKGRFTISRDNPNNSLYLQMKFLGAEDTALYYCARGGRTGTFDIWGLGTMVTVSS

SEQ ID NO: 27179 - protein, 96 aa, Homo sapiens
AASTITFGDHWMSWVRQAPGKGLEWVANIKPDGSDKYYADSVAGRFTISRDNPNNSLYLQMKFLGVEDTALYYCARGGRTGTFDIWGLGTVVTVSS

SEQ ID NO: 27180 - protein, 95 aa, Homo sapiens
PSTFSFDDYWMSWVRQAPGKGLEWVANIKPDGGEQYYADSVKGRFTISRDNPKKSLDLQMKFLGAEDTALYYCARGGRTGTFDIWGLGTMVTVSS

SEQ ID NO: 27181 - protein, 96 aa, Homo sapiens
AASTFTFADYWMSWVRQAPAKGLEWVANIKPDGSDQYYADSVVGRFTISRDNPNNSLFLQMKFLGAEDTALYYCARGGRTGTFDIWGLGTMVTVSS

SEQ ID NO: 27182 - protein, 96 aa, Homo sapiens
ATSTFTFAEYWMSWVRQAPGKGLEWVANIKPDGSDQFYADSVKGRFTISRDNPNNSLFLQMKFLGAEDTALYYCARGGRTGTFDIWGLGTMVTVSS

SEQ ID NO: 27183 - protein, 95 aa, Homo sapiens
ASTFTFPDYWMSWVRQAPGKGLEWVANIKPDGSDQYYADSVKGRFTISRDNPNKSLHLQLKFLGAEDTALYYCARGGRTGTFDIWGLGTMVTVSS

SEQ ID NO: 27184 - protein, 96 aa, Homo sapiens
AASTFTFGDYWMSWVRQAPGKGLEWVANIKPDGTDQYYADSVKGRFTISRDNPNNSLFLQMKFLGVEDTALYYCARGGRTGTFDIWGLGTMVSVSS

SEQ ID NO: 27185 - protein, 96 aa, Homo sapiens
AGSAFTFNEYWMSWVRQAPGKGLEWVANIKPDGSEHYYADSVKGRFTISRDNPNNSLYLQMKFLGVEDTALYYCARGGRTGTFDIWGLGTMVTVSS

SEQ ID NO: 27186 - protein, 96 aa, Homo sapiens
VASAFTFADYWMSWVRQAPGKGLEWVANIKQDGSEKYYVESVKGRFTISRDNPNNSLYLQMNFLGAVDTAVYYCARGGRTGTFDIWGQGTMVTVSS

SEQ ID NO: 27187 - protein, 96 aa, Homo sapiens
AASTFTFGDYWMSWVRQAPGKGLEWVANIKPDGSVQYSVDSVKGRFTISRDNPNNSLYLQMKFLGAEDTALYYCARGGRTGTFDIWGLGTMVTVSS

SEQ ID NO: 27188 - protein, 96 aa, Homo sapiens
AASTFTFGDFWMSWVRQAPGKGLEWLANIKPDGSEQYYADSVEGRFTISRDNPSNSLFLQMKFLGAEDTALYYCARGGRTGTFDIWGLGTMVTVSS

SEQ ID NO: 27189 - protein, 96 aa, Homo sapiens
AASTFTFGDYWMSWVRQAPGKGLEWVANIKPDGSVQYSADSVKGRFTISRDNPNDSLYLQMKFLGAEDTALYYCARGGRTGTFDIWGLGTMVTVSS

SEQ ID NO: 27190 - protein, 96 aa, Homo sapiens; identical to SEQ ID NO: 27178

SEQ ID NO: 27191 - protein, 95 aa, Homo sapiens
ASTFTFADYWMSWVRQAPGKGLEWVANIKPDGSDQYYADSVKGRFTISRDNPNKSLHLQLKFLGAEDTALYYCARGGRTGTFDIWGLGTMVTVSS

SEQ ID NO: 27192 - protein, 95 aa, Homo sapiens
ASTFTLVDYWMSWVRQAPGKGLEWVANIKPDGSEKYYVDSVKGRFTISRDNPNNSLYLQMKFLGGEDTARYFCARGGRTGTFDIWGQGTMVTVSS

SEQ ID NO: 27193 - protein, 95 aa, Homo sapiens
ASTFTFGDYWMAWVRQAPGKGLEWVANIKPDGSGQFYADSVKGRFTISRDNPNKSLDLQMKYLGAEDTALYYCARGGRTGTFDIWGLGTMVTVSS

SEQ ID NO: 27194 - protein, 96 aa, Homo sapiens
AASTITFGDHWMSWVRQAPGKGLEWVANIKPDGSDQYYADSVAGRFTISRDNPNNSLYLQMKFVGVEDTALYYCARGGRTGTFDIWGLGTVVTVSS

SEQ ID NO: 27195 - protein, 96 aa, Homo sapiens
AASTISFGDHWMSWVRQAPGKGLEWVANIKPDGSDKYYADSVAGRFTISRDNPNNSLYLQMKFLGVEDTALYYCARGGRTGTFDIWGLGTVVTVSS

SEQ ID NO: 27196 - protein, 110 aa, Homo sapiens
TVSGGSISSSSYYWGWIRQPPGKGLEWIGSMYYSGSTHYNPSLKSRVTISVDTSKNQFSLKLSSVTAADTAVYYCARHEGIGDYDYVWGPTSRLGAFDIWGQGTMVTVSS

SEQ ID NO: 27197 - protein, 110 aa, Homo sapiens; identical to SEQ ID NO: 27196

SEQ ID NO: 27198 - protein, 110 aa, Homo sapiens; identical to SEQ ID NO: 27196

SEQ ID NO: 27199 - protein, 110 aa, Homo sapiens; identical to SEQ ID NO: 27196

SEQ ID NO: 27200 - protein, 110 aa, Homo sapiens
TVSGGSISSSSYYLGWIRQPPGKGLEWIGSMYYSGSTHYNPSLKSRVTISVDTSKNQFSLKLSSVTAADTAVYYCARHEGIGDYDYVWGPTSRLGAFDIWGQGTMVTVSS

SEQ ID NO: 27201 - protein, 110 aa, Homo sapiens; identical to SEQ ID NO: 27196

SEQ ID NO: 27202 - protein, 110 aa, Homo sapiens; identical to SEQ ID NO: 27196

SEQ ID NO: 27203 - protein, 110 aa, Homo sapiens
TVSGGSISSSSYYWGWIRQPPGKGLEWIGSMYYSGSTHYNPSLKSRVTISVDTSKNQFSLKLSSVTTADTAVYYCARHEGIGDYDYVWGPTSRLGAFDIWGQGTMVTVSS

SEQ ID NO: 27204 - protein, 110 aa, Homo sapiens
TVSGGSISSSSYFWGWIRQPPGKGLEWIGSMYYSGSTHYNPSLKSRVTISVDTSKNQFSLKLSSVTAADTAVYYCARHEGIGDYDYVWGPTSRLGAFDIWGQGTMVTVSS

SEQ ID NO: 27205 - protein, 101 aa, Homo sapiens
SASGFNFGNFAMHWVRQAPGKGLNSVAAISLNGIRTDYADSVKGRFTISRDNALNTLHLQMTGLTTEDTGIYYCVKDHDSGSNYWHHLDFWGQGTLVTVSS

SEQ ID NO: 27206 - protein, 101 aa, Homo sapiens
SASGFNFGNFAMHWVRQAPGKGLNSVSAISLNGIRTDYADSVKGRFTISRDNALNTLHLQMTGLTTDDTGIYYCVKDHDSGSNYWHHLDFWGQGTLVTVSS

SEQ ID NO: 27207 - protein, 101 aa, Homo sapiens
SASGFNFGNFAMHWVRQAPGKGLNPVSAISMNGIKTDYADSVKGRFTISRDNALNTLHLQMTGLTTEDTGIYYCVKDHDSGSNYWHHLDFWGQGTLVTVSS

SEQ ID NO: 27208 - protein, 101 aa, Homo sapiens
SASGFNFGNFAMHWVRQAPGKGLNSVAAISLNCIRTDYADSVKGRFTISRDNALNTLHLQMTGLTTEDTGIYYCVKDHDSGSNYWHHLDFWGQGTLVTVSS

SEQ ID NO: 27209 - protein, 101 aa, Homo sapiens
SASGFNFGNFAMHWVRQAPGKGLNSVAAISLNGIRTDYTDSVKGRFTISRDNALNTLHLQMTGLTTEDTGIYYCVKDHDSGSNYWHHLDFWGQGTLVTVSS

SEQ ID NO: 27210 - protein, 101 aa, Homo sapiens
SASGFNFGNFAMHWVRQAPGKGLNSVAAISLNGIRTDYADSVKGRFTISRDNALNTLHLQMTGLTTEHTGIYYCVKDHDSGSNYWHHLDFWGQGTLVTVSS

SEQ ID NO: 27211 - protein, 97 aa, Homo sapiens
AASGFTFNNAWMTWVRQAPGKGLEWVGRILIKTDGGTTNYAAPVIGRFSISTDDSKTTLYLQMNSLKTEDTAVYYCTTYSSGAVRDWGQGTLVTVSS

SEQ ID NO: 27212 - protein, 96 aa, Homo sapiens
AASGFTFNNAWMTWVRQAPGKGLEWVGRILIKTDGGTTNYAAPVIGRFSISTDDSKTTLYLQMNSLKTEDTAVYYCTTYSSGAVRDWGQGTLVTVS

SEQ ID NO: 27213 - protein, 97 aa, Homo sapiens; identical to SEQ ID NO: 27211

SEQ ID NO: 27214 - protein, 97 aa, Homo sapiens
AASGFTFNNAWMTWVRQAPGKGLEWVGRIFIESDGETTNYAAPVKGRFSISTDDSKTTLYLQMNSLRTEDTAVYYCTTYSSGAVRDWGQGTLVTVSS

SEQ ID NO: 27215 - protein, 97 aa, Homo sapiens; identical to SEQ ID NO: 27211

SEQ ID NO: 27216 - protein, 97 aa, Homo sapiens
AASGFTFNNAWMTWVRQAPGKGLEWLGRILIKTDGGATNYAAPVIGRFSISTDDSKTTLYLQMNSLKIEDTAVYYCTTYSSGAVRDWGQGTLVTVSS

SEQ ID NO: 27217 - protein, 97 aa, Homo sapiens; identical to SEQ ID NO: 27211

SEQ ID NO: 27218 - protein, 97 aa, Homo sapiens
ASGFSFSIYAMHWVRQAPGKGLEWVALIWYDGSNERYADSVRGRFTVSRDNSKSTLYLQMNSLRAEDTAVYYCARAEANRSPWFDPWGQGTLVIASS

SEQ ID NO: 27219 - protein, 97 aa, Homo sapiens; identical to SEQ ID NO: 27218

SEQ ID NO: 27220 - protein, 99 aa, Homo sapiens
TVSGGSIDANCWNWVRQAPGKGLEWIGYVCYSGSTKYNPSLQSRTTILADTPKNQFSLKLRSVTPADTAVYFCTRIPRSTGPFGWFDPWGQGTLVTVSS

SEQ ID NO: 27221 - protein, 99 aa, Homo sapiens; identical to SEQ ID NO: 27220

SEQ ID NO: 27222 - protein, 99 aa, Homo sapiens
TVSGGSIDANCWNWVRQAPGKGLEWIGYVCSSGSTKYNPSLQSRTTILADTPKNQFSLKLSSVTPADTAVYFCTRIPRSTGPFGWFDPWGQGTLVTVSS

SEQ ID NO: 27223 - protein, 114 aa, Homo sapiens
AASGFTFSSYSMNWVRQAPGKGLEWVSSISSSSNYIYYPDSVKGRFTVSRDNAKNSLYLQMNSLRAEDTAVYYCARSPHDYGDYGYYYDSSGFRSNYYYYMDVWGRGTTGTVSS

SEQ ID NO: 27224 - protein, 114 aa, Homo sapiens; identical to SEQ ID NO: 27223

SEQ ID NO: 27225 - protein, 114 aa, Homo sapiens
AASGFTFSSYSMNWVRQAPGKGLEWVSSISSSSNYIYYPDSVKGRFTVSRDNAKNSLYLQMNSLRAEDTAAYYCARSPHDYGDYGYYYDSSGFRSNYYYYMDVWGRGTTGTVSS

SEQ ID NO: 27226 - protein, 114 aa, Homo sapiens
AASGFTFSSYSMNWVRQAPGKGLEWVSSISSSSNYIYYPDLVKGRFTVSRDNAKNSLYLQMNSLRAEDTAVYYCARSPHDYGDYGYYYDSSGFRSNYYYYMDVWGRGTTGTVSS

SEQ ID NO: 27227 - protein, 108 aa, Homo sapiens
TQTLTLTCTFSGFSLTPSGMSVSWIRQPPGKALEWLARIDWDDDKYYMTSLKTRLTISKDTAKSQVVLTMTNMDPVDTATYYCARAIYGTGTYGVFDVWGQGTMVTVS

SEQ ID NO: 27228 - protein, 109 aa, Homo sapiens
TQTLTLTCTFSGFSLTPSGMSVNWIRQPPGKALEWLARIDWDDDKYYSTSLKTRLTISKDTSKNQVVLTMTKMEAVDTATYFCARAIYGTGTYGVFDVWGQGTMVTVSS

SEQ ID NO: 27229 - protein, 109 aa, Homo sapiens
TQTLTLTCTFSGFSLTPSGMSVNWIRQPPGKALEWLARIDWDDDKYYSTSLKTRLTISKDTSKNQVVLTMTNMDPVDTATYYCARAIYGTGTYGVFDVWGQGTRVTVSS

SEQ ID NO: 27230 - protein, 109 aa, Homo sapiens; identical to SEQ ID NO: 27229

SEQ ID NO: 27231 - protein, 90 aa, Homo sapiens
AASGLSVSSNYMSWVRQAPGKGPEWVSILFSSDYAHYADSVKGRFTISRDNSKNTLYLQMNSLRIDDTAVYYCVSRSGYLGQGTLVTVSS

SEQ ID NO: 27232 - protein, 90 aa, Homo sapiens
AASGFSVSSNYMSWVRQAPGKGPEWVSILFSSNYAHYADSVKGRFTISRDNSKNTLYLQMNSLRIDDTAVYYCVSRSGYLGQGTLVTVSS

SEQ ID NO: 27233 - protein, 90 aa, Homo sapiens; identical to SEQ ID NO: 27231

SEQ ID NO: 27234 - protein, 90 aa, Homo sapiens
AASGFAVSSNYMSWVRQAPGKGLEWVSILYSSDYAYYADSVKGRFTTSRDNSKNTLYLQMHSLRADDTAVYYCVSRSGYLGQGTLVTVSS

SEQ ID NO: 27235 - protein, 97 aa, Homo sapiens
GASGLTFRNYEMNWVRQAPGEGLEWVSFIDSGGSVVTYADSVRGRFTTSRDNAKNSLHLQMNSLRDEDTAVYYCVTDEAGIIDFDNWGQGTQVTVSS

SEQ ID NO: 27236 - protein, 97 aa, Homo sapiens
GASGLTFRIYEMNWVRQAPGEGLEWVSFIDSGGSVVTYADSVRGRFTTSRDNAKNSLHLQMNSLRDEDTAVYYCVTDEAGIIDFDNWGQGTQVTVSS

SEQ ID NO: 27237 - protein, 97 aa, Homo sapiens
GASGLTFRNYEMNWVRQAPGEGLEWVSFIDSGGSVVTYADSVKGRFTTSRDNAKNSLHLQMNSLRDEDTAVYYCVTDEAGIIDFDNWGQGTQVTVSS

SEQ ID NO: 27238 - protein, 97 aa, Homo sapiens
GASGLTFRNYEMNWVRQAPGEGLEWVSFIDSGGSVVTYADSVRGRFTTSRDNAKNSLHLQMNSLRDEDTAVYYCVTDEAGIIDFDNWGQGTQVTVPS

SEQ ID NO: 27239 - protein, 97 aa, Homo sapiens
GASGLTFRNYEMNWVRQAPGEGLEWVSFIDRGGSVVTYADSVRGRFTTSRDNAKNSLYLQMNSLRDEDTAVYYCVTDEAGIIDFDNWGQGTQVTVSS

SEQ ID NO: 27240 - protein, 97 aa, Homo sapiens; identical to SEQ ID NO: 27239

SEQ ID NO: 27241 - protein, 97 aa, Homo sapiens
GASGLTFRNYEMNWVRQAPGEGLEWVSFIDSGGSVVTYADSVRGRFTTSRDNAKNSLYLQMNSLRDEDTAVYYCVTDEAGIIDFDNWGQGTQVTVSS

SEQ ID NO: 27242 - protein, 97 aa, Homo sapiens
VSGGSINNNNWWTWVRQSPGKGLEWIGEILHTGNTHYNPSLKSRLTISMDKSKNQFSLNLSSVTAADTAVYYCARDHEGWQAASDVWGQGILVTVSS

SEQ ID NO: 27243 - protein, 97 aa, Homo sapiens
VSGGSINNNKWWTWVRQSPGKGLEWIGEILHTGNTHYNPSLKSRLTISMDKSKNQFSLNLSSVTAADTAVYYCARDHEGWQAASDVWGQGILVTVSS

SEQ ID NO: 27244 - protein, 97 aa, Homo sapiens
VSGGSINNNNWWTWVRQPPGKGLEWIGEILHTGSTHYNPSLKSRLTISLDKSNNQFSLNLSSVTAADTAVYYCARDHEGWQAASDVWGQGILVTVSS

SEQ ID NO: 27245 - protein, 98 aa, Homo sapiens
AVSGGSISRNNWWTWVRQPPGKGLEWIGEIFHDGSTHYKPSLKSRLTISLDKTNNNFSLKLRSVTAADTAIYYCARDHEGWQAASDVWGPGILVTVSS

SEQ ID NO: 27246 - protein, 97 aa, Homo sapiens; identical to SEQ ID NO: 27244

SEQ ID NO: 27247 - protein, 97 aa, Homo sapiens
VSGGSINNNNWWSWVRQPPGKGLEWIGEILHTGNTHYNPSLKSRLTISLDKSNNQFSLNLSSVTAADTAVYYCARDHEGWQAASDVWGQGILVTVSS

SEQ ID NO: 27248 - protein, 96 aa, Homo sapiens
AASGFTVSSYGMNWVRQAPGKGLEWVSHIGGSSSNTYYADSVKGRFTISRDSSKNTLYLQMNSLRAEDTAVYFCAKLVGHTVYDYWGQGTLVTVSS

SEQ ID NO: 27249 - protein, 96 aa, Homo sapiens; identical to SEQ ID NO: 27248

SEQ ID NO: 27250 - protein, 96 aa, Homo sapiens; identical to SEQ ID NO: 27248

SEQ ID NO: 27251 - protein, 96 aa, Homo sapiens; identical to SEQ ID NO: 27248

SEQ ID NO: 27252 - protein, 96 aa, Homo sapiens
AASGFTVSSYGMNWVRQAPGKGLEWVSHIGGSSSNTYYADSVKGRFTISRDSSKNTLYLQMNSLRAEDTAVYFWAKLVGHTVYDYWGQGTLVTVSS

SEQ ID NO: 27253 - protein, 95 aa, Homo sapiens
ASGFTVSSYGMNWVRQAPGKGLEWVSHIGGSSSNTYYADSVKGRFTISRDSSKNTLYLQMNSLRAEDTAVYFCAKLVGHTVYDYWGQGTLVTVSS

SEQ ID NO: 27254 - protein, 96 aa, Homo sapiens
AASGFTVSSYGMNWVRQAPGKGLEWVSHIGGSSSNTYYADSVKGRFTISRDSSKNTLYLQMNSLRAEDTAIYFCAKLVGHTVYDYWGQGTLVTVSS

SEQ ID NO: 27255 - protein, 92 aa, Homo sapiens
TVSGDSLRSSYWSWIRQPPGKGLEWIGYVYYTGSTDYNPSLSSRVSISVDTSKNQFSLTLRSVTTADTAVYYCAKEGPDGYWGQGTLVTVSS

SEQ ID NO: 27256 - protein, 92 aa, Homo sapiens
TVSGDSLRSSYWSWIRQPPGKGLEWIGYVYYTGSTDYNPSLSSRVTISVDTSKNQFSLTLRSVTAADTAVYYCAKEGPDGYWGQGTLVTVSS

SEQ ID NO: 27257 - protein, 92 aa, Homo sapiens
NVSGDSLRNSYWSWIRQPPGKGLEWIGYIYYTGATNYNPSLNSRVTISIDTSKNQFSLKLISVTAADTAVYYCAKEGPDGYWGQGTLVTVSS

SEQ ID NO: 27258 - protein, 92 aa, Homo sapiens; identical to SEQ ID NO: 27256

SEQ ID NO: 27259 - protein, 92 aa, Homo sapiens; identical to SEQ ID NO: 27257

SEQ ID NO: 27260 - protein, 92 aa, Homo sapiens
TVSGDSMRSSYWSWIRQSPGKGLEWIGYIYYTGTANYNPSLSSRVTISADTSKNQFSLKLSSVTPADTAVYYCAKEGPDGYWGQGTLVTVSS

SEQ ID NO: 27261 - protein, 92 aa, Homo sapiens
TVSGDSLRNSYWSWIRQTPGKGLEWIGYIYYSGSTDYNPSLSSRVTISVDTSKNHFSLKLRSVTAADTAVYYCAKEGPDGYWGQGILVTVSS

SEQ ID NO: 27262 - protein, 92 aa, Homo sapiens
TVSGDSLRNSYWSWIRQTPGKGLEWIGYIYYSGSTDYNPSLSSRVTISVDTSKNQFSLKLRSVTAADTAVYYCAKEGPDGYWGQGILVTVSS

SEQ ID NO: 27263 - protein, 92 aa, Homo sapiens
TVSGVSLRGSYWSWIRQTPGKGLEWIGRMYYSGSTDYNPSLNGRVTISVDTSKNQFSLKLISVTAADTAVYYCAKEGPDGYWGQGTLVTVSS

SEQ ID NO: 27264 - protein, 92 aa, Homo sapiens
TVSGDSLRNSYWSWIRQTPGKGLEWIGYIYYSGSTDYNPSLSSRVTISVDTSKNHFSLKLRSVTTADTAVYYCAKEGPDGYWGQGILVTVSS

SEQ ID NO: 27265 - protein, 101 aa, Homo sapiens
TVSGDSISSGGYFWTWIRHHPERGLEWIAWINNSGTTNHNPSLKSRIDISLDRSKNQLSLRLTSVTDADTAVYYCARIPYHSSGWGWFDPWGRGTLVTVSS

SEQ ID NO: 27266 - protein, 101 aa, Homo sapiens
TVSGDSIRTGGYFWTWIRHHPEKGLEWIAYINYSGTSNRNPSLKSRIDISLDTSKNQLSLKLTSVTDADTAVYYCARIPYHSSGWGWFDPWGRGTLVTVSS

SEQ ID NO: 27267 - protein, 101 aa, Homo sapiens
TVSGDSISSGGSFWTWIRHHPEKGLEWIGYINYSGTGNQNPSLKSRIDISLDTSKNQLSLKLTSVTDADTAVYYCARIPYHSSGWGWFDPWGRGTLVTVSS

SEQ ID NO: 27268 - protein, 101 aa, Homo sapiens
TVSGDSISSGGYFWTWIRHHPERGLEWIAWINYSGTTNHNPSLKSRIDISLDTSKNQLSLKLTSVTDADTAVYYCARIPYHSSGWGWFDPWGRGTLVTVSS

SEQ ID NO: 27269 - protein, 101 aa, Homo sapiens
KGSGYSFTSYWIGWVRQMPGKGLEWMGFIYPGDSDTRYSPSFQGQVTISVDNSISTTYLKWNSLKASDTATYYCARSSCGSGSCNSDFDYWGQGTLVTVSS

SEQ ID NO: 27270 - protein, 101 aa, Homo sapiens; identical to SEQ ID NO: 27269

SEQ ID NO: 27271 - protein, 101 aa, Homo sapiens; identical to SEQ ID NO: 27269

SEQ ID NO: 27272 - protein, 101 aa, Homo sapiens; identical to SEQ ID NO: 27269

SEQ ID NO: 27273 - protein, 101 aa, Homo sapiens
KGSGYSFTSYWIGWVRQMPGKGLEWMGFIYPGDSDTRYSPSFQGQVTISVDNSISTTYLKWNSLKASDTATYYCARSSCGSGSCNSDFDYWGQGTLVIVSS

SEQ ID NO: 27274 - protein, 101 aa, Homo sapiens; identical to SEQ ID NO: 27269

SEQ ID NO: 27275 - protein, 94 aa, Homo sapiens
AASGFSVSGGHMDWIRQAPGKGLEWVSSIYTSDDTFYAASVRGRFTISRDSFKNTLYLQMNSLRAEDTALYYCARHFDSVTGFWGQGTLVTVSS

SEQ ID NO: 27276 - protein, 94 aa, Homo sapiens
AASGSSVSGGHMDWIRQAPGKGLEWVSSIYTSDDTFYAASVRGRFTISRDSFKNTLYLQMNSLRAEDTALYYCARHFDSVTGFWGQGTLVTVSS

SEQ ID NO: 27277 - protein, 94 aa, Homo sapiens
AASGFSVSGGHMDWIRQAPGKGLEWVSSMYTSDDTFYAASVRGRFTISRDSFKNTLYLQMNSLRAEDTALYYCARHFDSVTGFWGQGTLVTVSS

SEQ ID NO: 27278 - protein, 94 aa, Homo sapiens
AASGFSVSGGHMDWIRQAPGKGLEWVSSIYTNDNTYYADSVRGRFTISRDSFKNTLYLQMNSLRAEDTALYYCARHFDSVTGFWGQGTLVTVSS

SEQ ID NO: 27279 - protein, 96 aa, Homo sapiens
ASGYTFRNYYLHWVRQSPGQGFQWMGVMHPGGVTSTYPETFQGRVTMTRDTSTSTGYMELTSLRSDDTALYYCARGSGIAAPGDYWGQGTLVTVSS

SEQ ID NO: 27280 - protein, 96 aa, Homo sapiens
ASGYTFRNYYLHWVRQSPGQGFQWMGVMHPGGVTSTYPETFQGRVTMTRDTSTSTGYMELTSLRSDGTALYYCARGSGIAAPGDYWGQGTLVTVSS

SEQ ID NO: 27281 - protein, 96 aa, Homo sapiens
ASGYTFRNYYLHWVRQSPGQGFQWMGVMHPGGVTSTYPETFQSRVTMTRDTSTSTGYMELTSLRSDDTALYYCARGSGIAAPGDYWGQGTLVTVSS

SEQ ID NO: 27282 - protein, 96 aa, Homo sapiens
ASGYTFRNYYLHWVRQSPGQGLQWVGVMHPGGVTSTYPETFQGRVTMTMDTSTSTGYMELTSLRSDDTALYYCARGSGIAAPGDYWGQGTLVTVSS

SEQ ID NO: 27283 - protein, 103 aa, Homo sapiens
AASGFTFSTYAMHWVRQAPGMGLEWVAVLWYDGRNTFYGDSVKGRFTISRDNSKKTLYLQMDSLRAEDTAVYYCARPLGFGGNENHYYYMDVWGKGTTVTVSS

SEQ ID NO: 27284 - protein, 103 aa, Homo sapiens
AASGFTFSTYAMHWVRQAPGMGLEWVAVVWYDGSNKHYGDSVKGRFTISRDNSRKTLYLQMDSLRAEDTAVYYCARPLGFGGNENHYYYMDVWGKGTTVTVSS

SEQ ID NO: 27285 - protein, 103 aa, Homo sapiens
AASGFTFSTYAMHWVRQAPGMGLEWVAVLWYDGRNTFYGDSVKGRFTISRDNSKKTLYLQMVSLRAEDTAVYYCARPLGFGGNENHYYYMDVWGKGTTVTVSS

SEQ ID NO: 27286 - protein, 103 aa, Homo sapiens
AAYGFTFSTYAMHWVRQAPGMGLEWVAVVWYDGSNKHYGDSVKGRFTISRDNSRKTLYLQMDSLRAEDTAVYYCARPLGFGGNENHYYYMDVWGKGTTVTVSS

SEQ ID NO: 27287 - protein, 103 aa, Homo sapiens
AASGFTFSSYGMHWVRQAPGMGLEWVAVLWFDGSNKYYANSVKGRFTISRDNSKNTLYLQMDSLGAEDTAVYYCARPLGFGGNENHYYYMDVWGKGTTVTVSS

SEQ ID NO: 27288 - protein, 103 aa, Homo sapiens
AASGFTFSTYAMHWVRQAPGMGLEWVAVLWYDGRNKFYAESVKGRFTISRDNPKKTLYLQMDSLRAEDTAVYYCARPLGFGGNENHYYYMDVWGKGTTVTVSS

SEQ ID NO: 27289 - protein, 103 aa, Homo sapiens
AASGFTFSSYAMHWVRQAPGMGLEWVAVLWFDGSNKFYANSVKGRFTISRDNSKNTLYLQMDSLGAEDTAVYYCARPLGFGGNENHYYYMDVWGKGTTVTVSS

SEQ ID NO: 27290 - protein, 103 aa, Homo sapiens
AASGFTFSSYAMHWVRQAPGMGLEWVAVLWYDGSNKYYTDSVKGRFTISRDNSKNTVYLQMNSLRAEDTAVYYCARPLGFGGNENHYYYMDVWGKGTTVTVSS

SEQ ID NO: 27291 - protein, 103 aa, Homo sapiens
AASGFTFSTYAMHWVRQAPGMGLEWVAVLWYDGRNKFYADSVKGRFTISRDNSKKTLYLQMDSLRAEDTAVYYCARPLGFGGNENHYYYMDVWGKGTTVTVSS

SEQ ID NO: 27292 - protein, 96 aa, Homo sapiens
EASGFSYSSYWMSWVRQAPGKGLEWVANIKQDESTKNYVDSVKGRFTISRDNAKNSLYLQMGSLRAEDTGVYYCARDDGWSRFEFWGQGTLVTVSS

SEQ ID NO: 27293 - protein, 96 aa, Homo sapiens
EASGFTYNSYWMSWVRQAPGKGLEWVGNINQDESTKNYVDSVKGRFTISRDNAKNSLYLQMGSLRAEDTGVYYCARDDGWSRFEFWGQGTLVTVSS

SEQ ID NO: 27294 - protein, 96 aa, Homo sapiens
EASGFSYSSYWMSWVRQAPGKGLEWVANIKQDESTKNYVDSVEGRFTISRDNAKNSLYLQMGSLRAEDTGVYYCARDDGWSRFEFWGQGTLVTVSS

SEQ ID NO: 27295 - protein, 96 aa, Homo sapiens; identical to SEQ ID NO: 27292

SEQ ID NO: 27296 - protein, 96 aa, Homo sapiens
EASGFTFSDYWMSWVRQAPGMGLEWVANIKQDESKKNYVDSVKGRFTISRDNARNALYLQMDSLRAEDTAVYYCARDDGWSRFEFWGQGTLVTVSS

SEQ ID NO: 27297 - protein, 95 aa, Homo sapiens
TASGFTFGDSGMSWVRQAPGKGLEWVGYIRGKASGGTTEYAASVKGRFTISRDDSKSIAYLQMNSLKTEDTGVYYCARRSVFDSWGQGTLVTVSS

SEQ ID NO: 27298 - protein, 95 aa, Homo sapiens; identical to SEQ ID NO: 27297

SEQ ID NO: 27299 - protein, 95 aa, Homo sapiens
TASGFTFGDSGMSWVRQAPGKGLEWVGYIRGKVSGGTTEYAASVKGRFTISRDDSKSIAYLQMNSLKTEDTGVYYCARRSVFDSWGQGTLVTVSS

SEQ ID NO: 27300 - protein, 95 aa, Homo sapiens
TASGFTFGDSGMSWIRQAPGKGLEWVGYIRGKASGGTTEYAASVKGRFTISRDDSKSIAYLQMNSLKTEDTGVYYCARRSVFDSWGQGTLVTVSS

SEQ ID NO: 27301 - protein, 95 aa, Homo sapiens
TASGFTFGDFGMSWVRQAPGKGLEWVGYIRGKASGGTTEYAASVKGRFTISRDDSKSIAYLQMNSLKTEDTGVYYCARRSVFDSWGQGTLVTVSS

SEQ ID NO: 27302 - protein, 98 aa, Homo sapiens
GVSGVSISNNNWWTWARQTPGKGLEWIGEIHHSMGTHYSPSLKSRLTISVDKSKNDFSLTLTSVTAADTAVYYCARDREEWAAASDVWGQGILVTVSS

SEQ ID NO: 27303 - protein, 98 aa, Homo sapiens; identical to SEQ ID NO: 27302

SEQ ID NO: 27304 - protein, 98 aa, Homo sapiens
AVSGGSISNNNWWTWVRQPPGKGLEWIGEVHHRLGTHYKPSLKSRLEISIDKSKNEFSLKLTSVTAADTAVYYCARDREEWAAASDVWGPGTLVTVSS

SEQ ID NO: 27305 - protein, 98 aa, Homo sapiens; identical to SEQ ID NO: 27302

SEQ ID NO: 27306 - protein, 98 aa, Homo sapiens
AVSGGSISNNNWWTWVRQPPGKGLEWIGEVHHRLGTHYKPSLKSRLEISIDKSKNELSLKLTSVTAADTAVYYCARDREEWAAASDVWGPGTLVTVSS

SEQ ID NO: 27307 - protein, 98 aa, Homo sapiens
AVSGGSITNNNWWTWVRQPPGKGLEWIGEILHDGRTHYSPSLKSRLTISMDKSRNEFSLRLTSVTAADTAVYYCARDREEWAAASDVWGQGTLVTVSS

SEQ ID NO: 27308 - protein, 104 aa, Homo sapiens
AVSGGSISDGGYSWGWVRQPPGKPLEWLGYIFYTGTTFLNPSLRSRVTLSVDTSKNRFSLQLSSVTAADTAVYYCARADFYTRRDYQGNAFDVWGQGTKVTVSS

SEQ ID NO: 27309 - protein, 104 aa, Homo sapiens
AVSGGSISDGGYSWSWVRQPPGKPLEWLGYIFYTGTTFLNPSLRSRVTLSVDTSKNRFSLQLSSVTAADTAVYYCARADFYTRRDYQGNAFDVWGQGTKVTVSS

SEQ ID NO: 27310 - protein, 104 aa, Homo sapiens
AVSGGSISDGGYSWSWVRQPPGKPLEWLGYIFYTGTTFLNPSLRSRVTLSVDTSKNRFPLQLSSVTAADTAVYYCARADFYTRRDYQGNAFDVWGQGTKVTVSS

SEQ ID NO: 27311 - protein, 104 aa, Homo sapiens
AVSGGSISDGGYSWSWVRQPPGKPLEWLGYIFYTGTTFLNPSLRSRVTLSVDTSQNRFSLQLSSVTAADTAVYYCARADFYTRRDYQGNAFDVWGQGTKVTVSS

SEQ ID NO: 27312 - protein, 102 aa, Homo sapiens
AAAGFTFSSYQMHWVRQFPGKGLEWVAAITSDGSSTFFADFVQGRFTLSRDNAKSTMYLQMNGLRAEDTAVYYCVRARGRDGTTGKNCFDPWGQGTLVTVSS

SEQ ID NO: 27313 - protein, 102 aa, Homo sapiens; identical to SEQ ID NO: 27312

SEQ ID NO: 27314 - protein, 102 aa, Homo sapiens
AAAGFTFSSYQMHWVRQFPGKGLEWVAAITSDGSSTFFADFVQGRFTFSRDNAKSTMYLQMNGLRVEDTAVYYCVRARGRDGTTGKNCFDPWGQGTLVTVSS

SEQ ID NO: 27315 - protein, 102 aa, Homo sapiens
AAAGFTFSSYQMHWVRQFPGKGLEWVAAITSDGSSTFFADFVQGRFTLSRDNAKSTMYLQMNGLRVEDTAVYYCVRARGRDGTTGKNCFDPWGQGTLVTVSS

SEQ ID NO: 27316 - protein, 99 aa, Homo sapiens
TVSGGSFSSDYWSWIRQPPGKGLEWIGYIYYTGTTNYNPSLKSRVTISVDTSKSQFSLKLSSVTAADTAVYYCARLLYYDRSGYHLGDWGQGTLVTVSS

SEQ ID NO: 27317 - protein, 99 aa, Homo sapiens; identical to SEQ ID NO: 27316

SEQ ID NO: 27318 - protein, 99 aa, Homo sapiens; identical to SEQ ID NO: 27316

SEQ ID NO: 27319 - protein, 97 aa, Homo sapiens
SGGSFSSDYWSWIRQPPGKGLEWIGYIYYTGTTNYNPSLKSRVTISVDTSKSQFSLKLSSVTAADTAVYYCARLLYYDRSGYHLGDWGQGTLVTVSS

SEQ ID NO: 27320 - protein, 99 aa, Homo sapiens; identical to SEQ ID NO: 27316

SEQ ID NO: 27321 - protein, 99 aa, Homo sapiens
TVSGGSFSSDYWSWIRQPPGKGLEWIGYIYYTGTTNYNPSLRSRVTISVDTSKSQFSLKLSSVTAADTAVYYCARLLYYDRSGYHLGDWGQGTLVTVSS

SEQ ID NO: 27322 - protein, 91 aa, Homo sapiens
GFNFKKAYMSWVRQAPGKGLEWIGRIKGENEGGIKDYAAPVEGRFTLSRDDSINTVYLQMTSLRTEDTAVYYCTTGILPLWGQGTLVTVSS

SEQ ID NO: 27323 - protein, 91 aa, Homo sapiens
GFNSKKAYMSWVRQAPGKGLEWIGRIKGENEGGIKDYAAPVEGRFTLSRDDSINTVYLQMTSLRTEDTAVYYCTTGILPLWGQGTLVTVSS

SEQ ID NO: 27324 - protein, 91 aa, Homo sapiens; identical to SEQ ID NO: 27322

SEQ ID NO: 27325 - protein, 91 aa, Homo sapiens; identical to SEQ ID NO: 27322

SEQ ID NO: 27326 - protein, 94 aa, Homo sapiens
AASGINFKKAWMSWVRQAPGKGLEWIGRVKSETDGGTTDYAAPVEGRFTISRDDSINTLYLQMTSLKTEDTAVYYCTTGILPLWGQGTLVTVSS

SEQ ID NO: 27327 - protein, 93 aa, Homo sapiens
AASGINFKKAWMSWVRQAPGKGLEWIGRVKSETDGGTDYAAPVEGRFTISRDDSINTLYLQMTSLKTEDTAVYYCTTGILPLWGQGTLVTVSS

SEQ ID NO: 27328 - protein, 96 aa, Homo sapiens
AASGFTFSTYWMTWVRQAPGKGLEWVANIKEDGGDKYYADSVKGRFTISRDDPKSSLYLQMNFLGVVDTAVYYCARGGRTGALDFWGLGTLVTVSS

SEQ ID NO: 27329 - protein, 96 aa, Homo sapiens
AASGFTFSTYWMTRVRQAPGKGLEWVANIKEDGGDKYYADSVKGRFTISRDDPKSSLYLQMNFLGVVDTAVYYCARGGRTGALDFWGLGTLVTVSS

SEQ ID NO: 27330 - protein, 96 aa, Homo sapiens
AASGFTFSTYWMTWVRQAPGKGLEWVANIKEDGSDKYYADSVKGRFTISRDDPKSSLYLQMNFLGVADTAVYYCARGGRTGALDFWGLGTLVTVSS

SEQ ID NO: 27331 - protein, 96 aa, Homo sapiens
AASGFTFSTYWMTWVRQAPGKGLEWVANIKEDGSDKYYADSVKGRFTISRDDPKSSLYLQMNFLGVVDTAVYYCARGGRTGALDFWGLGTLVTVSS

SEQ ID NO: 27332 - protein, 96 aa, Homo sapiens; identical to SEQ ID NO: 27331

SEQ ID NO: 27333 - protein, 96 aa, Homo sapiens
AASGFTLSTYWMTWVRQAPGKGLEWVGNIKEDGSEKYYVDSVKGRFTISRDDPKNSLYLQMNFLGVVDTAVYYCARGGRTGALDFWGQGTLVTVSS

SEQ ID NO: 27334 - protein, 96 aa, Homo sapiens
AASGFTFSTYWMTWVRQAPGKGLEWVANIKEDGSDKYYADSVKGRFTISRDDPKTSLYLQMNFLGVVDTAVYYCARGGRTGALDFWGLGTLVTVSS

SEQ ID NO: 27335 - protein, 96 aa, Homo sapiens; identical to SEQ ID NO: 27331

SEQ ID NO: 27336 - protein, 96 aa, Homo sapiens
AASGFTFSTYWMTWVRQAPGKGLEWVANIKEDGSDKYYADSVKGRLTISRDDPKSSLYLQMNFLGVVDTAVYYCARGGRTGALDFWGLGTLVTVSS

SEQ ID NO: 27337 - protein, 99 aa, Homo sapiens
TVSGGSISGYFWGWFRQSPEKGLEWINYVLETGRTKDNPSFVSRATVSSDMSKSQIYLKLTSVTAADAAVYYCARLPRVAGSFGWFDAWGPGIRVTVSS

SEQ ID NO: 27338 - protein, 99 aa, Homo sapiens
TVSGGSISGYFWGWFRQSPEKGLEWINYVLETGKTKDNPSFVSRATVSSDMSKSQFYLKLTSVTAADAAVYYCARLPRVAGSFGWFDAWGPGIRVTVSS

SEQ ID NO: 27339 - protein, 99 aa, Homo sapiens
TVSGGSISGYFWGWFRQSPEKGLEWINYVLEAGKTKDNPSFVSRATVSSDMSKSQFYLKLTSVTAADAAVYYCARLPRVAGSFGWFDAWGPGIRVTVSS

SEQ ID NO: 27340 - protein, 102 aa, Homo sapiens
AASGFTFNIYSMNWVRLAPGKGLEWVSSISSSSSFINYADSVQGRFTISRDNARNSLFLQMNSLRAEDTAVYYCARERSSTTWGADDAFDIWGQGTMVTVSS

SEQ ID NO: 27341 - protein, 102 aa, Homo sapiens
AASGFTFNIYSMHWVRLAPGKGLEWVSSISSSSSFINYADSVQGRFTISRDNARDSLFLHMNSLRAEDTAVYYCARERSSTTWGADDAFDIWGQGTMVTVSS

SEQ ID NO: 27342 - protein, 102 aa, Homo sapiens; identical to SEQ ID NO: 27340

SEQ ID NO: 27343 - protein, 102 aa, Homo sapiens; identical to SEQ ID NO: 27340

SEQ ID NO: 27344 - protein, 98 aa, Homo sapiens
AVSGGSITNDNYWTWARQAPGKGLEWVGEIHPSGTTHYSPSLKSRLTISLDKSKNEFSLRLTSVTAADTAVYYCARDREGWQAASDVWGQGTPVTVSS

SEQ ID NO: 27345 - protein, 98 aa, Homo sapiens
AVSGGSITNNNYWTWARQAPGKGLEWVGEIHPSGTTHYSPSLKSRLTISLDKSKNEFSLRLTSVTAADTAVYYCARDREGWQAASDVWGQGTPVTVSS

SEQ ID NO: 27346 - protein, 98 aa, Homo sapiens
AVSGASISNNNWWTWVRQPPGKGLQWLGEVLHNGNTHYNPSLQSRLTISMDKSNNEFYLRLESVTAADTAMYYCARDREGWQAASDVWGPGTLVTVSS

SEQ ID NO: 27347 - protein, 98 aa, Homo sapiens
AVSGGSITNNNWWTWARQAPGKGLEWVGEIHPSGTTHYSPSLKSRLTISLDKSKNEFYLRLTSVTAADTAVYYCARDREGWQAASDVWGQGTPVTVSS

SEQ ID NO: 27348 - protein, 97 aa, Homo sapiens
AVSGGSINNNNWWTWARRPPGKGLEWLAEIHPDGGTHYSPSLKSRLTISLDKSKNEFSLTLSSVAAADTAVYYCARDREGWQAASDVWGQGILVTVS

SEQ ID NO: 27349 - protein, 98 aa, Homo sapiens
AVSGGSITNNNYWTWARQAPGKGLEWVGEIHPSGTTHYSPSLKSRLTISIDKSKNEFSLRLTSVTAADTAVYYCARDREGWQAASDVWGQGTPVTVSS

SEQ ID NO: 27350 - protein, 98 aa, Homo sapiens; identical to SEQ ID NO: 27345

SEQ ID NO: 27351 - protein, 98 aa, Homo sapiens
AVSGGSITNNNYWTWARQAPGKGLEWVGEIHPSGTTHYNPSLKSRLTISLDKSKNEFSLRLTSVTAADTAVYYCARDREGWQAASDVWGQGTPVTVSS

SEQ ID NO: 27352 - protein, 98 aa, Homo sapiens
AISGGSITNNNYWTWARQAPGKGLEWVGEIHPSGTTHYSPSLKSRLTISLDKSKNEFSLRLTSVTAADTAVYYCARDREGWQAASDVWGQGTPVTVSS

SEQ ID NO: 27353 - protein, 106 aa, Homo sapiens
AASGFTFDNYAIHWVRQTPGRGLEWVALIANDGGQEYFAESVKGRFTISRDRYKRKVILYMNILRPDDTAVYYCARDGADLGAPGPYQPHYYMDVWGRGTTVTVSS

SEQ ID NO: 27354 - protein, 106 aa, Homo sapiens
AASGFTFDNYAIHWVRQTPGRGLEWVAVIANDGGQEYFADSVKGRFTISRDRYKRKVILYMNILRPDDTAVYYCARDGADLGAPGPYQPHYYMDVWGRGTTVTVSS

SEQ ID NO: 27355 - protein, 99 aa, Homo sapiens
TVSGGSLSGFFWGWFRQSPEKGLEWIGYVLDTGDTKDNPSFVSRSTISLDKSNSRFSLKLRSMTVADTAVYYCARLPRVAGSFGFFDPWGRGILVTVSS

SEQ ID NO: 27356 - protein, 99 aa, Homo sapiens
TVSGGSISGFFWGWFRQSPEKGLEWIGYVFDTGNTKDNPSFVSRATISLDMSSSRFSLKLTSVTVADTAVYYCARLPRVAGSFGFFDPWGRGILVTVSS

SEQ ID NO: 27357 - protein, 99 aa, Homo sapiens
TVSGDSIRGYFWGWFRQTPEQGLEWIGYVLDSGQTKENPSFVSRVTISRDMSKSQFSLKLSSVTVADTAVYYCARLPRVAGSFGFFDPWGQGILVTVSS

SEQ ID NO: 27358 - protein, 99 aa, Homo sapiens
TVSGGSIRGYFWGWFRQTPEQGLEWIGYVLDNGQIKENPSFVSRATISRDTSKSQFSLQLSSVTAADTAVYYCARLPRVAGSFGFFDPWGQGILVTVSS

SEQ ID NO: 27359 - protein, 99 aa, Homo sapiens
TVSGGSISGFFWGWFRQSPEKGLEWIGYVFDTGNTKDNPSFVSRATISLDMSSSRFSLKLTSVTVADTAVYYCARLPRVAGSFGFFDPWGRGILFTVSS

SEQ ID NO: 27360 - protein, 99 aa, Homo sapiens
TVSGGSIRGYFWGWFRQTPEQGLEWIGYVLDSGQTKENPSFVSRATISRDMSKSQFSLKLSSVTVADTAVYYCARLPRVAGSFGFFDPWGQGILVTVSS

SEQ ID NO: 27361 - protein, 99 aa, Homo sapiens
TVSGGSISGFFWAWLRQSPEKGLEWIGSVFETGNTKDNPSFVSRTSIFLDMSRSRFSLKLTSVTAADTAIYYCARLPHVSGSFGWFDPWGRGILVTVSS

SEQ ID NO: 27362 - protein, 99 aa, Homo sapiens
TVSGGSISVFFWAWLRQSPEKGLEWIGSVFETGNTKDNPSFVSRTSIFLDMSRSRFSLKLTSVTAADTAIYYCARLPHVSGSFGWFDPWGRGILVTVSS

SEQ ID NO: 27363 - protein, 99 aa, Homo sapiens
TVSGGSISGFFWAWLRQSPEKGLEWIGSVFETGNTKDNPSFVSRTSILLDMSSSRFSLKLTSVTAADTAIYYCARLPHVSGSFGWFDPWGRGILVTVSS

SEQ ID NO: 27364 - protein, 99 aa, Homo sapiens
TVSGGSISGFFWAWLRQSPEKGLEWIGSVFETGNTKDNPSFVSRTSILLDMTSSRFSLKLTSVTAADTAIYYCARLPHVSGSFGWFDPWGRGILVTVSS

SEQ ID NO: 27365 - protein, 96 aa, Homo sapiens
VASASTFADYWMSWVRQAPGKGLEWVANIKEDGSDKYYVDSVKGRFTISRDNPNNSLYLQMKFLGAEDTAVYYCARGGRSGTFDIWGQGAMVTVSS

SEQ ID NO: 27366 - protein, 95 aa, Homo sapiens
ASGFTFSVFWMSWARQVPGKGLEWVANIKEDGSEKYYVDSVKGRFTISRENSNNSLYLQMKFLGAEDSAIYYCARGGRSGTFDIWGQGTVVTVSS

SEQ ID NO: 27367 - protein, 96 aa, Homo sapiens
VASAFTFEDYWMSWVRQAPGKGLEWVANIKQDGSEKYHVDSVKGRFTITRDNPNSSLYLEMKFLGVEDTAVYYCARGGRSGTFDIWGQGTMVTVSS

SEQ ID NO: 27368 - protein, 96 aa, Homo sapiens; identical to SEQ ID NO: 27365

SEQ ID NO: 27369 - protein, 96 aa, Homo sapiens
VASGFTFEDYWMSWVRQAPGKGLEWVANIKQDGSEKYHVDSVKGRFTITRDNPNTSLYLEMKFLGVEDTAVYYCARGGRSGTFDIWGQGTMVTVSS

SEQ ID NO: 27370 - protein, 96 aa, Homo sapiens
VASAFTFEDYWMSWVRQAPGKGLEWVANIKEDGSAKFLADSVKGRFTITRDNPNTALYLQMNFLGAEDTAVYYCARGGRSGTFDIWGQGTMVTVSS

SEQ ID NO: 27371 - protein, 95 aa, Homo sapiens
ASTFNFADYWMSWVRQAPGKGLEWVANIKPDGSDQYYADSVKGRFTISRDNPNKSLDLQMKFLGAEDTALYFCARGGRSGTFDIWGLGTMVTVSS

SEQ ID NO: 27372 - protein, 96 aa, Homo sapiens
VASAFTFEDYWMSWVRQAPGKGLEWVANIKGDGSEKYHVDSVEGRFTIARDNPNSSLYLQMKFLGVEDTAVYYCARGGRSGTFDIWGQGTMVTVSS

SEQ ID NO: 27373 - protein, 96 aa, Homo sapiens
VASAFTFEDYWMSWVRQAPGKGLEWVANIKEDGSEKFHADSVKGRFTITRDNPNTALYLQMKFLGAEDTAVYYCARGGRSGTFDIWGQGTMVTVSS

SEQ ID NO: 27374 - protein, 99 aa, Homo sapiens
TVSGASMRGYFWGWFRQSPEKGLEWIAYVFDTGNTKDNPSFVSRATISLDMSKRQFSLKLTSVTVADTAVYYCARLPRVAGSFGWFDPWGQGLLVTVSS

SEQ ID NO: 27375 - protein, 99 aa, Homo sapiens
TVSGGSISGYFWGWFRQPPEKGLEWIGYVLDTENTKDNPSFVSRATISLDMSKSQFSLKLTSVTVADTAVYYCARLPRVAGSFGWFDPWGQGILVTVSS

SEQ ID NO: 27376 - protein, 99 aa, Homo sapiens
TVSDGSISGYFWGWFRQPPEKGLEWIGYVLDTENTKDNPSFVSRATISLDMSKSQFSLKLTSVTVADTAVYYCARLPRVAGSFGWFDPWGQGILVTVSS

SEQ ID NO: 27377 - protein, 99 aa, Homo sapiens
TVSGGSIGNYFWSWIRQSPGKGLEWIGYTYNSGSTKYNPSLKSRVTISADTSKNQFSLDLTSVSAADTAVYYCARLPRVAGSFGWFDPWGQGTLVTVSS

SEQ ID NO: 27378 - protein, 99 aa, Homo sapiens
TVSGGSISGYFWGWFRQPPEKGLEWIGYVLDTENTKDNPSFVSRTTISLDMSKSQFSLKLTSVTVADTAVYYCARLPRVAGSFGWFDPWGQGILVTVSS

SEQ ID NO: 27379 - protein, 99 aa, Homo sapiens
TVSGGSISGYFWGWFRQSPEKGLEWINYVLEPGKTKDNPSFVSRATISLDMSNSQFSLKLTSVTVADTAVYYCARLPRVAGSFGWFDPWGQGILVTVSS

SEQ ID NO: 27380 - protein, 99 aa, Homo sapiens
TVSGASMRGYFWGWFRQSPEKGLEWIAYVFDTGNTKDNPSFVSRATISLDMSKSQFSLKLTSVTVADTAVYYCARLPRVAGSFGWFDPWGQGILVTVSS

SEQ ID NO: 27381 - protein, 99 aa, Homo sapiens
TVSGGSISGYYWGWFRQPPEKGLEWIGYVLDTGNTKDSPSFVSRATISLDIAKSQFSLKLTSATVADTAVYFCARLPRVAGSFGWFDPWGQGILVTVSS

SEQ ID NO: 27382 - protein, 99 aa, Homo sapiens
TVSGGSISGYFWGWFRQPPEKRMEWIGYVVETGYTKDNPSFVSRASISVDMSRSQFSLKMTSVTVADTAVYYCARLPRVAGSFGWFDPWGQGILVTVSS

SEQ ID NO: 27383 - protein, 98 aa, Homo sapiens
TVSGGSISGYFWGWFRQTPEKGLEWIGYVLDTGNTKDNPSFASRATISLDMSKSHFSLKLTSVTVADTAVYYCARLPRVAGSFGWFDPWGQGILVTVS

SEQ ID NO: 27384 - protein, 99 aa, Homo sapiens
TVSGGSISGYFWGWFRQPPEKGLEWIGYVVDTGYSKHSPSLVSRATISLDKSNSQFSLKLTSVTVADTAVYYCARLPRVAGSFGWFDPWGQGILVTVSS

SEQ ID NO: 27385 - protein, 99 aa, Homo sapiens
TVSGGSISGYFWGWFRQPPEQGLEWIGYVLDTVHTKHNPSFVSRATISLDMSKSQFSLKLTSVTVADTAVYYCARLPRVAGSFGWFDPWGQGILVTVSS

SEQ ID NO: 27386 - protein, 99 aa, Homo sapiens
TVSGGSMSGYFWGWFRQSPEKGLEWIGYVVDSGRTKDNPSFVSRATISLDMSRSQFSLTLTSVTVADTAVYYCARLPRVAGSFGWFDPWGQGILVTVSS

SEQ ID NO: 27387 - protein, 99 aa, Homo sapiens
TVSGGSISGYFWGWFRQSPEKGLEWIGYVLDSGRIKDNPSFVSRATISLDMSRSRFSLTLTSVTVADTAVYYCARLPRVAGSFGWFDPWGQGILVTVSS

SEQ ID NO: 27388 - protein, 99 aa, Homo sapiens
TVSGGSISGFFWGWFRQSPERGLEWIGYVLDTRNTKDNPSFVRRATISLDMSNSQFSLKLTSVTVADTAIYYCARLPRVAGSFGWFDPWGRGILVTVSS

SEQ ID NO: 27389 - protein, 99 aa, Homo sapiens
TVSGGSISGFFWGWFRQSPEKGLEWIGYVFDTGNTKDNPSFVSRSTISLDMSSSRFSLALTSVTVADTAVYYCARLPRVAGSFGWFDPWGRGILVTVSS

SEQ ID NO: 27390 - protein, 99 aa, Homo sapiens
TVSGASISNYYWSWIRQSPGKGLEWIGYTYNGGSTKSNPSLEGRITISPDTSKNQFSLKLNSVTAADTAVYFCARLPRVAGSFGWFDPWGQGTVVTVSS

SEQ ID NO: 27391 - protein, 99 aa, Homo sapiens
TVSGGSISGYFWGWFRQSPEKGLEWIAYVVESGKTKDNPSFLSRATISLDMSKSQFSLTLTSVTVADTAVYYCARLPRVAGSFGWFDPWGQGILVTVSS

SEQ ID NO: 27392 - protein, 99 aa, Homo sapiens
TVSGGSISGYFWGWFRQTPEKGLEWIGYVLDTGNTKDNPSFASRATISLDMSKSHFSLKLTSVTVADTAVYYCARLPRVAGSFGWFDPWGQGTLVTVSS

SEQ ID NO: 27393 - protein, 99 aa, Homo sapiens
TVSGGSISGYFWGWFRQPPEKGLEWIGYVVDTGYSKHSPSLVSRATISLDKSNSQFSLKLTFVTVADTAVYYCARLPRVAGSFGWFDPWGQGILVTVSS

SEQ ID NO: 27394 - protein, 99 aa, Homo sapiens
AVSGGSVNNDKWWHWVRQPPGKGLEWIGEIHRSGTTNYNPSLKSRVTVSMDKSKNQLSLKLRSVTAADTAIYFCASHYDTRGYGAFEIWGQGTTVTVSS

SEQ ID NO: 27395 - protein, 99 aa, Homo sapiens
VVSSGSVNNNKWWSWVRQPPGKGLEWIGEIHQSGPTNYNPSLKSRVTVSMDKSKNQLSLNLRSVTAADTAIYFCASHYDTRGYGAFEIWGQGTMVTVSS

SEQ ID NO: 27396 - protein, 99 aa, Homo sapiens
VVSSGSVNNNKWWSWVRQPPGKGLEWIGEIHQSGPTNYNPSLKSRVTVSMDKSENQVSLNLRSVTAADTAIYFCASHYDTRGYGAFEIWGQGTMVTVSS

SEQ ID NO: 27397 - protein, 99 aa, Homo sapiens; identical to SEQ ID NO: 27395

SEQ ID NO: 27398 - protein, 99 aa, Homo sapiens; identical to SEQ ID NO: 27394

SEQ ID NO: 27399 - protein, 98 aa, Homo sapiens
AVSGGSVNNDKWWHWVRQPPGKGLEWIGEIHRSGTTNYNPSLKSRVTVSMDKSKNQLSLKLRSVTAADTAIYFCASHYDTRGYGAFEIWGQGTTVTVS

SEQ ID NO: 27400 - protein, 99 aa, Homo sapiens
AVSGGSVNNDKWWHWVRQPPGKGLEWIGEIHRSGTTNYNPSLKSRVTVSMDKFKNQLSLKLRSVTAADTAIYFCASHYDTRGYGAFEIWGQGTTVTVSS

SEQ ID NO: 27401 - protein, 99 aa, Homo sapiens
AVSGGSVNNDKWWHWVRQPPGKGLEWIREIHRSGTTNYNPSLKSRVTVSMDKSKNQLSLKLRSVTAADTAIYFCASHYDTRGYGAFEIWGQGTTVTVSS

SEQ ID NO: 27402 - protein, 96 aa, Homo sapiens
SGFTFRDSGMHWVRQAPGKGLEWVALISYDGSNEYYRDSVKGRFTISRDTSRNTLYLQMNSLRLEDTAVYYCAKARIRSSPSSDYWGQGTLVTVSS

SEQ ID NO: 27403 - protein, 96 aa, Homo sapiens; identical to SEQ ID NO: 27402

SEQ ID NO: 27404 - protein, 98 aa, Homo sapiens
VVSGFTFRSSGMHWVRQAPGKGLEWVALISYDGSNEYYADSVKGRFTISRDTSKNTLYLQMNSLRVEDTAVYYCAKARIRSSPSSDYWGQGTLVTVSS

SEQ ID NO: 27405 - protein, 99 aa, Homo sapiens
ASGRTFSNNEIHWVRQAPGQGLEWMGRIIPLFGPTIYAQSFQGRLTITADESTSTTYMELSSLRSEDTAVYYCASGYYDTRGYYSQEYWGQGTPVTVSS

SEQ ID NO: 27406 - protein, 99 aa, Homo sapiens; identical to SEQ ID NO: 27405

SEQ ID NO: 27407 - protein, 98 aa, Homo sapiens
ASGGTLSSYEISWVRQAPGQGLEWMGMIIPIFGPATYAQKFQGRLTITAESTNTAYMELSSLTSEDTAVYYCASGYYDTRGYYSQEYWGQGSLVTVSS

SEQ ID NO: 27408 - protein, 98 aa, Homo sapiens
SASGFTFSTYAMHWVRQAPGKGLEYVSAISNNGGSTYYAESVKGRFTISRDNSKNTLYLQMSSLRTEDTAVYYCVKDRGSIVRDFDYWGQGTLATVSS

SEQ ID NO: 27409 - protein, 98 aa, Homo sapiens
SASGFTFSTYAMHWVRQAPGKGLKYVSAISNNGGSTYYAESVKGRFTISRDNSKNTLYLQMSSLRTEDTAVYYCVKDRGSIVRDFDYWGQGTLATVSS

SEQ ID NO: 27410 - protein, 98 aa, Homo sapiens; identical to SEQ ID NO: 27408

SEQ ID NO: 27411 - protein, 96 aa, Homo sapiens
AASGFIFSNAWMTWVRQAPGKGLEWVGRIGSESDGGTTQYAAPVQGRFTISRDDSKHTLYLQMNSLKIEDTAVYFCTTGGVARDYWGQGTLVTVSS

SEQ ID NO: 27412 - protein, 96 aa, Homo sapiens
AASGFIFSNAWMTWVRQAPGKGLEWVGRIGSESAGGTTQYAAPVQGRFTISRDDSKHTLYLQMNSLKIEDTAVYFCTTGGVARDYWGQGTLVTVSS

SEQ ID NO: 27413 - protein, 96 aa, Homo sapiens; identical to SEQ ID NO: 27411

SEQ ID NO: 27414 - protein, 96 aa, Homo sapiens
AASGFIFSNAWMTWVRQAPGKGLEWVGRIGSESDGGTTQYAAPVQGRLTISRDDSKHTLYLQMNSLKIEDTAVYFCTTGGVARDYWGQGTLVTVSS

SEQ ID NO: 27415 - protein, 93 aa, Homo sapiens
AASGFTFSIYTMTWVRQAPGKGLEWVSYISNSGSMIFYADSVKGRFTISRDNAKNSLYLQMNSLRDEDTAVYYCAGGRGFDYWGQGTLVTVSS

SEQ ID NO: 27416 - protein, 93 aa, Homo sapiens
AASGFTFSIYTMTWVRQAPGKGLEWLSYISNSGSMIFYADSVKGRFTISRDNAKNSLYLQMNSLRDEDTAVYYCAGGRGFDYWGQGTLVTVSS

SEQ ID NO: 27417 - protein, 93 aa, Homo sapiens; identical to SEQ ID NO: 27415

SEQ ID NO: 27418 - protein, 93 aa, Homo sapiens; identical to SEQ ID NO: 27416

SEQ ID NO: 27419 - protein, 93 aa, Homo sapiens
AASGFTFSIYTMTWVRQAPGKGLEWFSYISNSGSMIFYADSVKGRFTISRDNAKNSLYLQMNSLRDEDTAVYYCAGGRGFDYWGQGTLVTVSS

SEQ ID NO: 27420 - protein, 93 aa, Homo sapiens; identical to SEQ ID NO: 27415

SEQ ID NO: 27421 - protein, 99 aa, Homo sapiens
ASGFSFSNYGMHWVRQAPGKGLEWVAMISYHGSNKYYADSVEGRLTISRDNSKNTLYLQMNSLRDEDAAVYYCAKDRTPYSYATHFDYWGQGALVTVSS

SEQ ID NO: 27422 - protein, 99 aa, Homo sapiens
ASGFSFSNYGMHWVRQAPGKGLEWVAMVSYDGQNKYYGGSGGGRLTIYRDNSKNTLYLQMTSLRLEDAAVYYCAKDRTPYSYATHFDYWGQGTQVTVSS

SEQ ID NO: 27423 - protein, 99 aa, Homo sapiens; identical to SEQ ID NO: 27421

SEQ ID NO: 27424 - protein, 99 aa, Homo sapiens; identical to SEQ ID NO: 27421

SEQ ID NO: 27425 - protein, 99 aa, Homo sapiens
ASGFSFSNYGMHWVRQAPGKGLEWVAMISYDGYKKYYGDSVEGRLTISRDNSKNTLYLQMNSLRDEDAAVYYCAKDRTPYSYATHFDYWGQGALVTVSS

SEQ ID NO: 27426 - protein, 99 aa, Homo sapiens
ASGFSFSNYGMHWVRQAPGKGLEWVAMISYHGSNKYYADSVEGRLTISRDNSKNTLYLQMNSLRDEDAAVYYCAKDRTPYSYATHFDYWGQGVLVTVSS

SEQ ID NO: 27427 - protein, 102 aa, Homo sapiens
TVSGGSISSSYWSWIRQPPGKGLEWIGYIYFGGSTNYNPSLKSRVTISEDTSKNQFSLKMSSVTAADTAVYYCGRVHSDSTSYRSNDALDIWGQGTMVTVSS

SEQ ID NO: 27428 - protein, 102 aa, Homo sapiens
TVSGGSISSSYWSWIRQPPGKGLEWIGYIYFGGSTNYNPSLKSRVTISEDTSKNQFSLKMSSVTAADTAGYYCGRVHSDSTSYRSNDALDIWGQGTMVTVSS

SEQ ID NO: 27429 - protein, 102 aa, Homo sapiens
TVSGASISSSYWSWIRQAPGKGPEWIGYLYFGGSTKYNPSLKSRVTISEDTSKNQFSLKMTSVTAADTAVYYCGRVHSDSTSYRSNDALDIWGQGTMVTVSS

SEQ ID NO: 27430 - protein, 102 aa, Homo sapiens; identical to SEQ ID NO: 27427

SEQ ID NO: 27431 - protein, 96 aa, Homo sapiens
AASGFIISNHEMNWVRQAPGKGLEWVSYISSPGDGVFYADSVRGRFTISRDSARNSLYLQMNSLRVEDTAVYYCAREFEHADFDYWGQGTLVTVSS

SEQ ID NO: 27432 - protein, 96 aa, Homo sapiens
AASGFIISNHEMNWVRQAPGKGLEWVSYISSPGDGVFYADSVRGRFTISRDSARNSLYLQMNSLRVEDTAVHYCAREFEHADFDYWGQGTLVTVSS

SEQ ID NO: 27433 - protein, 96 aa, Homo sapiens
AASGFIISNHEMNWVRQAPGKGLEWVSYISSPGDSVFYADSVRGRFTISRDSARNSVSLQMNSLRVEDTAVYYCAREFEHADFDYWGQGTLVTVSS

SEQ ID NO: 27434 - protein, 97 aa, Homo sapiens
AASRFTFSSYWMHWVRQAPGKGLVWVSRINGDGTSISSADSVKGRFTISRDNAKNTLYLQMNSLRAEDTAVYFCARGADGYGNFDSWGHGTLVTVSS

SEQ ID NO: 27435 - protein, 97 aa, Homo sapiens; identical to SEQ ID NO: 27434

SEQ ID NO: 27436 - protein, 97 aa, Homo sapiens
AASRFTFSSYWMHWVRQAPGKGLVWISRINGDGTSISSADSVKGRFTISRDNAKNTLYLQMNSLRAEDTAVYFCARGADGYGNFDSWGHGTLVTVSS

SEQ ID NO: 27437 - protein, 97 aa, Homo sapiens
AASRFTFSSYWMHWVRQAPGKGLVWVSRINGDGTSISSADSVKGRFTISRDNAKNTLYLQMNSLRVEDTAVYFCARGADGYGNFDSWGHGTLVTVSS

SEQ ID NO: 27438 - protein, 101 aa, Homo sapiens
TVSSGSVNSGTIYWSWIRQPPGKGLEWIAHISDNGTPHYNPSVRGRVTISVDTSKNQVSLQLSSVTAADTAVYFCGRSDRRGTSFVEFDYWGQGTLVTVSS

SEQ ID NO: 27439 - protein, 101 aa, Homo sapiens
TVSGGSVSSGTYYWSWIRQPPGKGLEWIAHISYRGNPTYNPSLRGRVTISADTSKNQVSLQLSSVTAADTAVYYCGRSDRRGTSFVEFDYWGQGTLVTVSS

SEQ ID NO: 27440 - protein, 101 aa, Homo sapiens
TVSGGSVNSGSFYWSWIRQPPGKGLEWIAHIYYSGITTYNPSLRGRVTISVDTSKNQVSLQLSSVTAADTAVYYCGRSDRRGTSFVEFDYWGQGTLVTVSS

SEQ ID NO: 27441 - protein, 101 aa, Homo sapiens
TVSGGSVSSGTYYWSWIRQSPGKGLEWIGFISYSGNTNSNPSLRGRLTISADTSKNQVSLQLSSVTAADTAVYYCGRSDRRGTSFVEFDYWGQGTLVTVSS

SEQ ID NO: 27442 - protein, 101 aa, Homo sapiens
TVSGGSVSSGTYYWSWIRQPPGKGLEWIGFMSYSGNTNSNPSLRGRLTISVDTSKNQVSLQLSSVTAADTAVYYCGRSDRRGTSFVEFDYWGQGTLVTVSS

SEQ ID NO: 27443 - protein, 101 aa, Homo sapiens
TVSGGSVSSGTNYWNWIRQPPGKGLEWIGYIHDKGSTNYNPSLKGRVTISLDTSKNQVSLQLSSVTAADTAVYFCGRSDRRGTSFVEFDYWGQGTLVTVSS

SEQ ID NO: 27444 - protein, 101 aa, Homo sapiens
TVSGGSVSSGTYYWNWIRQPPGKGLEWIGYISYSGSTNSNPSLRGRVTISVDTSKNQVSLHLSSVTAADTAVYYCGRSDRRGTSFVEFDYWGQGTLVTVSS

SEQ ID NO: 27445 - protein, 101 aa, Homo sapiens
TVSGGSVNSGGYYWSWIRQSPGKGLEWIGFISYSGNINSNPSLRGRLTISLDTSENQVSLQLSSVTAADTAVYYCGRSDRRGTSFVEFDYWGQGTLVTVSS

SEQ ID NO: 27446 - protein, 101 aa, Homo sapiens; identical to SEQ ID NO: 27444

SEQ ID NO: 27447 - protein, 101 aa, Homo sapiens
TVSGGSVTSGTYYWNWIRQPPGKGLEWIGYVSYNGNTNCEPSLRGRVTISLDTSKNQVSLQLSSVTAADTAVYYCGRSDRRGTSFVEFDYWGRGTLVTVSS

SEQ ID NO: 27448 - protein, 101 aa, Homo sapiens
TVSGGTVSSGSHYWSWIRQPPGKGLEWIAYISDSGNTNYNPPLRGRVTISVDMSKNQVSLQVRSVTAADTAVYFCGRSDRRGTSFVEFDYRGQGTLVTVSS

SEQ ID NO: 27449 - protein, 101 aa, Homo sapiens
TVSGGSVSSGTYYWSWIRQPPGKGLEWIGFISYSGNTNSNPSLRGRLTISVDTSKNQVSLQLSSVSAADTAVYYCGRSDRRGTSFVEFDYWGQGTLVTVSS

SEQ ID NO: 27450 - protein, 101 aa, Homo sapiens
TVSGGSVSSGTYYWNWIRQPPGKGLEWIGYIYYRGDTNYNPSLKGRVTISVDTSKNQVSLQLSSVTAADTAVYFCGRSDRRGTSFVEFDYWGQGTRVTVSS

SEQ ID NO: 27451 - protein, 101 aa, Homo sapiens; identical to SEQ ID NO: 27443

SEQ ID NO: 27452 - protein, 101 aa, Homo sapiens
TVSGGSVSSGSDYWSWIRQPPGKGLEWIAYISNSGNNYYNPSLRGRVTMSVDTSKNQVSLHLSSVTAADTAVYYCGRSDRRGTSFVEFDYWGQGTLVSVSS

SEQ ID NO: 27453 - protein, 101 aa, Homo sapiens
TVSGGSVTSGTYYWNWIRQPPGKGLEWIGYIYSSGGTNYNPSLKGRVTISLDTSKNQVSLQLSSVTAADTAVYFCGRSDRRGTSFVEFDYWGQGTLVTVSS

SEQ ID NO: 27454 - protein, 101 aa, Homo sapiens
TLSGGSVSSDIFYWNWIRQTPGKGLEWLAYISDSGNTKYNPSLRGRVTISVDRSKNQVSLQLSSVTAADTAVYYCGRSDRRGTSFVEFDYWGQGTLVSVSS

SEQ ID NO: 27455 - protein, 101 aa, Homo sapiens
TVSSGSVGSGTIYWSWIRQPPGKGLEWIAHISDNGTPHYNPSLRGRGTIAVDTSKNQVSLQLSFVTAADTAVYFCGRSDRRGTSFVEFDYWGQGTLVTVSS

SEQ ID NO: 27456 - protein, 101 aa, Homo sapiens
TVSGGSVSSGSNYWSWIRQPPGKGLEWIAHISYSGNTNYNPSLRGRVTISVDTSKNQVFLQLSSVTAADTAVYYCGRSDRRGTSFVEFDYWGQGTLVTVSS

SEQ ID NO: 27457 - protein, 101 aa, Homo sapiens
TVSGGSVSGGTYYWNWIRQPPGKGLEWIGYIYYSGGTNYNPSLNGRVTISVDTSKNQVSLQLSSVTAADTAVYFCGRSDRRGTSFVEFDYWGQGTLVTVSS

SEQ ID NO: 27458 - protein, 101 aa, Homo sapiens
TVSGGSVSSGTYYYNWIRQPPGKGLEWIGYIYYSGGTNFNPSLKGRVTISLDTSKNQVSLQLSSVTAADTAVYFCGRSDRRGTSFVEFDYWGQGILVTVSS

SEQ ID NO: 27459 - protein, 101 aa, Homo sapiens
TVSGGSVSSGSHYWSWIRQPPGKGLEWIAYISDSGNTNYNPSLRGRVTISVDTSKTQVSLQLSSVTAADTAVYYCGRSDRRGTSFVEFDYRGQGTLVTVSS

SEQ ID NO: 27460 - protein, 101 aa, Homo sapiens
TVSGGSVNSGTNYWSWIRQPPGEGLEWIAHVSYTGRTNYNPSLGGRVTISVDTSKNQVSLQLSSVTAADTAVYYCGRSDRRGTSFVEFDYWGQGTLVTVSS

SEQ ID NO: 27461 - protein, 101 aa, Homo sapiens
IVSGGSVSSGTYYWNWIRQPPGKGLEWIGYISYTGGTNYNPSLKGRVTISVDTSKNQVSLQLSSVTAADTAVYFCGRSDRRGTSFVEFDYWGQGTLVTVSS

SEQ ID NO: 27462 - protein, 101 aa, Homo sapiens
TVSGGSVSSGTYYWNWIRQPPGKGLEWIGYIYNSGGTNYNPSLKGRVTISVDTSKNQVCLQLSSVTAADTAVYFCGRSDRRGTSFVEFDYWGQGTLVTVSS

SEQ ID NO: 27463 - protein, 101 aa, Homo sapiens
TVSGGSVSSGTYYYNWIRQPPGKGLEWVGYIYYSGGTNYNPSLNGRVTISIDTSKNQVSLQLSSVTAADTAVYFCGRSDRRGTSFVEFDYWGQGTLVTVSS

SEQ ID NO: 27464 - protein, 101 aa, Homo sapiens; identical to SEQ ID NO: 27447

SEQ ID NO: 27465 - protein, 101 aa, Homo sapiens
TVSGGSVSSGTYYWNWIRQPPGKGLEWVGYIYYSGGTNYNPSLKGRVTISLDTSKNQVSLQLSSVTAADTAVYFCGRSDRRGTSFVEFDYWGQGTLVTVSS

SEQ ID NO: 27466 - protein, 101 aa, Homo sapiens
TVSGGSVSSGTLYWSWIRQPPGKGLEWIAHISYSGNTIYNPSLRGRVTISVDTSKNQVSLQLSSVTAADTAVYYCGRSDRRGTSFVEFDYWGQGTLVTVSS

SEQ ID NO: 27467 - protein, 101 aa, Homo sapiens; identical to SEQ ID NO: 27444

SEQ ID NO: 27468 - protein, 101 aa, Homo sapiens
TVSGGSVSSGGYYWSWIRQSPGKGLEWIGFISYSGNINSNPSLRGRLTISVDTSENQVSLQLSSVTAADTAVYYCGRSDRRGTSFVEFDYWGQGTLVTVSS

SEQ ID NO: 27469 - protein, 101 aa, Homo sapiens
TVSGGSVSSGTYYWSWIRQPPGKGLEWIAHISYSGNTNYNPSLWGRVTISVDRSKNQVSLQLSSVTAADTAVYYCGRSDRRGTSFVEFDYWGQGTLVTVSS

SEQ ID NO: 27470 - protein, 101 aa, Homo sapiens
TVSSASVNSGTIYWSWIRQPPGKGLEWIAHISDNGTPHYNPSVRGRGTIAVDTSKNQVSLQLSFVTAADTAVYFCGRSDRRGTSFVEFDYWGQGTLVTVSS

SEQ ID NO: 27471 - protein, 97 aa, Homo sapiens
ASGFTLSSYWMTWARQAPGKGLEWVAHIKYDGSEKKYVDSVKGRFTISRDSAKNSLYLQMNSLRAEDTAVYYCARLSSAWGGAFDIWGQGTLVTVSS

SEQ ID NO: 27472 - protein, 97 aa, Homo sapiens; identical to SEQ ID NO: 27471

SEQ ID NO: 27473 - protein, 97 aa, Homo sapiens
ASGFTLSSFWMTWARQAPGKGLEWVAHIKYDGSEIKYVDSVKGRFIISRDSAKNALYVQMNSLRVEDTAVYYCARLSSAWGGAFDIWGQGTMVTVSS

SEQ ID NO: 27474 - protein, 94 aa, Homo sapiens
TVSGDSISSYYWSWIRQPPGKGLELIGYIYHTGTTTYNPSLESRVTISVDPSNNQFSLRLTSVTAADTAVYYCAKYEANRFAPWGQGTQVTVSS

SEQ ID NO: 27475 - protein, 94 aa, Homo sapiens
TVSGDSISSYYWSWIRQPPGKGLELIGYIYYTGTTTYNPSLESRVTISVDPSNNQFSLRLTSVTAADTAVYYCAKYEANRFAPWGQGTQVTVSS

SEQ ID NO: 27476 - protein, 94 aa, Homo sapiens
TVSGDSISSYYWSWIRQPPGKGLELIGYIYHTGTTTYNPSLESRVTISVDPSNNQFSLRLTSVTAADTAVYYCAKYEANRFAPWDQGTQVTVSS

SEQ ID NO: 27477 - protein, 94 aa, Homo sapiens
SVSGDSISNYYWSWIRQPPGKGLELIGYIFHTGTTTYNPSLESRVTISVDPSNNQFSLRLTSVTAADTAVYYCAKYEANRFAPWGQGTQVTVSS

SEQ ID NO: 27478 - protein, 93 aa, Homo sapiens
TVSNGSMSGYYWSWIRQPPEKGLEWIGYMYTGGGANYNPSLKSRVTMSVDTSKNEVSLNLTSVTAADTATYYCARYSSGWSLWGQGALVTVSS

SEQ ID NO: 27479 - protein, 93 aa, Homo sapiens
TVSNASMSGYYWSWIRQPPEKGLEWIGYMYTGGGANYNPSLKSRVTMSVDTSKNEVSLNLTSVTAADTATYYCARYSSGWSLWGQGALVTVSS

SEQ ID NO: 27480 - protein, 93 aa, Homo sapiens; identical to SEQ ID NO: 27479

SEQ ID NO: 27481 - protein, 98 aa, Homo sapiens
ASGFILSDHYMDWVRQAPGKGLEWVGRIRNKANRDTTDYVASVKGRFIISRDDSKNSLYLQMNSLKTEDAAVYYCTRVGLRSSSWDCWGQGARVTVSS

SEQ ID NO: 27482 - protein, 98 aa, Homo sapiens
ASGFILSDHYMDWVRQAPGKGLEWVGRIRNKANRDTTDYVASVKGRFIISRDDSKNSLYLQMNSLKTEDAAVYYCTRVGLRSSSWDCWGQGALVTVSS

SEQ ID NO: 27483 - protein, 98 aa, Homo sapiens; identical to SEQ ID NO: 27482

SEQ ID NO: 27484 - protein, 98 aa, Homo sapiens
ASGFTLSDHYMDWVRQAPGKGLEWVGRIRNKANRDTTDYVASVKGRFIISRDDSKNSLYLQMNSLKTEDAAVYYCTRVGLRSSSWDCWGQGALVTVSS

SEQ ID NO: 27485 - protein, 98 aa, Homo sapiens; identical to SEQ ID NO: 27482

SEQ ID NO: 27486 - protein, 98 aa, Homo sapiens; identical to SEQ ID NO: 27482

SEQ ID NO: 27487 - protein, 98 aa, Homo sapiens; identical to SEQ ID NO: 27481

SEQ ID NO: 27488 - protein, 98 aa, Homo sapiens
ASGFILSDHYMDWVRQAPGKGLEWVGRIRNKANRDTTDYVASVKGRFIISRDDSKNSLYLQMNSLKTEDVAVYYCTRVGLRSSSWDCWGQGARVTVSS

SEQ ID NO: 27489 - protein, 98 aa, Homo sapiens; identical to SEQ ID NO: 27482

SEQ ID NO: 27490 - protein, 98 aa, Homo sapiens
ASGFITSDHYMDWVRQAPGKGLEWVGRIRNKANRDTTDYVASVRGRFIISRDDSKNSLYLQMNSLKTEDAAVYYCTRVGLRSSSWDCWGQGTLVTVSS

SEQ ID NO: 27491 - protein, 98 aa, Homo sapiens
ASGFILSDHYMDWVRQAPGKGLEWVGRIRNKANRDTTDYVASVKGRFIISRDDSKNSLYLQMNSLKTEDAAVYYCTRVGLRSSSWDCWGQGTLVTVSS

SEQ ID NO: 27492 - protein, 97 aa, Homo sapiens
AVSGDSVSSSDYWSWVRQPPGKGLEWIGQIHLSLTTYYNPSLKSRVTVSVDRSKNQLSLKLTSVTAADTAVYYCARHLSGPPSHDHWGQGTLVTVSS

SEQ ID NO: 27493 - protein, 98 aa, Homo sapiens
AVSGDSISSSDYWSWVRQAPGKGLEWIGQIHLSLMTTYYNPSLKSRVTMSVDKSMNQLSLKVTSVSAADTAVYFCARHLSGPPSHDHWGQGTLVTVSS

SEQ ID NO: 27494 - protein, 96 aa, Homo sapiens
VSGDSISASDYWSWVRQPPGKGLEWIGQIHLTLTTYYNPALQGRVTVSVDRSKDQLSLRLTSVTAADTAVYYCARHLSGPPSHDHWGQGTLVTVSS

SEQ ID NO: 27495 - protein, 96 aa, Homo sapiens; identical to SEQ ID NO: 27494

SEQ ID NO: 27496 - protein, 97 aa, Homo sapiens
VSGDSISTSDYWSWVRQAPGKGLEWIGQIHLSLMATYYNPSLKSRVTMSVDKSMNQLSLKVTSVTAADTAVYFCARHLSGPPSHDHWGQGTLVTVSS

SEQ ID NO: 27497 - protein, 98 aa, Homo sapiens
AVSGDSISSSDYWSWVRQAPGKGLEWIGRIHLSLMTTYYNPSLKSRVTMSVDKSMNQLSLKVTSVSAADTAVYFCARHLSGPPSHDHWGQGTLVTVSS

SEQ ID NO: 27498 - protein, 110 aa, Homo sapiens
AVYGGSFSGYYWSWIRQPPGKGLEWIGEINHSRNTNYNPSLKSRVIISVDTSKNQFSLKLNSVTAADTAVYYCARGGLGRRHYGDYPPPARRPPRWFDPWGQGTLVTVSS

SEQ ID NO: 27499 - protein, 110 aa, Homo sapiens; identical to SEQ ID NO: 27498

SEQ ID NO: 27500 - protein, 110 aa, Homo sapiens; identical to SEQ ID NO: 27498

SEQ ID NO: 27501 - protein, 110 aa, Homo sapiens
AVYGGSFSGYYWSWIRQPPGKGLEWIGEINHGGGTNYNPSLKSRVAISLATSKNQFSLKLNSVTAADTAVYYCARGGLGRRHYGDYPPPARRPPRWFDPWGQGTLVTVSS

SEQ ID NO: 27502 - protein, 110 aa, Homo sapiens
AVYGGSFSGYYWSWIRQPPGKGLEWIGEINLSRNTNYNPSLKSRVIISVDTSKNQFSLKLNSVTAADTAVYYCARGGLGRRHYGDYPPPARRPPRWFDPWGQGTLVTVSS

SEQ ID NO: 27503 - protein, 110 aa, Homo sapiens
AVYGGSFSGYYWSWIRQPPGKGLEWIGEINHSRNTNYNPSLKSRAIISVDTSKNQFSLKLNSVTAADTAVYYCARGGLGRRHYGDYPPPARRPPRWFDPWGQGTLVTVSS

SEQ ID NO: 27504 - protein, 93 aa, Homo sapiens
SGYTFTNNNINWVRQAPGQRLEWMGWIKPGSGDTRYAQRFQGRVTITRDTSANTAYMELSSLRFEDTAVYYCAKWGPEPLAYWGQGTLVTVSS

SEQ ID NO: 27505 - protein, 93 aa, Homo sapiens
SGYTFTSNNINWVRQAPGQRLEWMGWIKPGSGDTRYAQRFQGRVTITRDTSANTAYMELSSLRFEDTAVYYCAKWGPEPLAYWGQGTLVTVSS

SEQ ID NO: 27506 - protein, 93 aa, Homo sapiens
SGYTFTSYNINWVRQAPGQRLEWMGWIKPGSGDTRYAQRFQGRVTITRDTSANTAYMELSSLRFEDTAVYYCAKWGPEPLAYWGQGTLVTVSS

SEQ ID NO: 27507 - protein, 93 aa, Homo sapiens; identical to SEQ ID NO: 27505

SEQ ID NO: 27508 - protein, 93 aa, Homo sapiens
SGYTFTSNNINWVRQAPGQRLEWMGWIKPGNGDTRYAQRFQGRVTITRDTSASTAYMELSSLRFEDTAVYYCAKWGPEPLAYWGQGTLVTVSS

SEQ ID NO: 27509 - protein, 93 aa, Homo sapiens; identical to SEQ ID NO: 27505

SEQ ID NO: 27510 - protein, 98 aa, Homo sapiens
AASGFIFSDYSIHWVRQAPGKGLEWVTVISKKSNSIQYADSVKGRFTVSRDNREKKVYLQMNSLRTDDTALYYCVKEHASAWPNLDYWGQGILVIVSS

SEQ ID NO: 27511 - protein, 98 aa, Homo sapiens; identical to SEQ ID NO: 27510

SEQ ID NO: 27512 - protein, 98 aa, Homo sapiens; identical to SEQ ID NO: 27510

SEQ ID NO: 27513 - protein, 98 aa, Homo sapiens; identical to SEQ ID NO: 27510

SEQ ID NO: 27514 - protein, 100 aa, Homo sapiens
AASGFTFSSYNMHWVRRTPGRGLEWVATISHDGSKTYYADSVKGRFTISRDSDEKQFLQMDSLRSEDTAVYYCGRDTVPFDAWTGGVQYWGQGTRVTVSS

SEQ ID NO: 27515 - protein, 100 aa, Homo sapiens
AASGFTFSSYNMHWVRRTPGRGLEWVVTISHDGSKTYYADSVKGRFTISRDSDEKQFLQMDSLRSEDTAVYYCGRDTVPFDAWTGGVQYWGQGTRVTVSS

SEQ ID NO: 27516 - protein, 100 aa, Homo sapiens
AASGFTFSSYNMHWVRRTPGRGLEWVATVSHDGSKTYYADSVKGRFTISRDSNEKQFLQIDSLRIEDTAVYYCGRDTVPFDAWTGGVQYWGQGTRVTVSS

SEQ ID NO: 27517 - protein, 100 aa, Homo sapiens
AASGFTFSSYNMHWVRRTPGRGLEWVATISHDGSKTYYADSVKGRFTISRDRNEKQFLQMDSLRSEDTAVYYCGRDTVPFDAWTGGVQYWGLGTRVTVSS

SEQ ID NO: 27518 - protein, 100 aa, Homo sapiens
AASGFIFSSYVMHWVRQAPGKGPEWVALISYDGTNEDYADSVKGRFTISRDTSKDTLYLQMNSLRSEDTAIYYCARDYRPVAASKYFDFWGQGTQVTVSS

SEQ ID NO: 27519 - protein, 100 aa, Homo sapiens
AASGFIFSSYVMHWVRQAPGKGPEWVALISYDGTNEDYADSVKGRFTISRDTSKDTLYLQMNSLRSEDTAVYYCARDYRPVAASKYFDFWGQGTQVTVSS

SEQ ID NO: 27520 - protein, 100 aa, Homo sapiens; identical to SEQ ID NO: 27519

SEQ ID NO: 27521 - protein, 100 aa, Homo sapiens
AASGFIFSSYVMHWVRQAPGKGPEWVALISFDGTNEDYADSVKGRFTISRDTSKDTLYLQMNSLRSEDTAIYYCARDYRPVAASKYFDFWGQGTQVTVSS

SEQ ID NO: 27522 - protein, 100 aa, Homo sapiens
AASGFTFSSYVMHWVRQAPGKGLEWVALISYDGTNKDYADSVKGRFTISRDTSKNTLYLQMNSLRTEDTAVYYCARDYRPVAASKYFDFWGQGTLVTVSS

SEQ ID NO: 27523 - protein, 98 aa, Homo sapiens
AASGFIFSSYVMHWVRQAPGKGPEWVALISYDGTTEDYADSVKGRFSISRDTSTLYLQMNSLRSEDTAVYYCARDYRPVAASKYFDFWGQGTQVTVSS

SEQ ID NO: 27524 - protein, 99 aa, Homo sapiens
TVSGGSISGYFWNWIRQSPGKGLEWIAYIHYSGSTNYNPSLKSRVTISLDTSKNEFSMKLSSMTAADTAVYYCGRSDRSGNSFVEFDYWGQGALVTVSS

SEQ ID NO: 27525 - protein, 99 aa, Homo sapiens
TVSGGSISGYFWNWIRQSPGKGLEWIAYIHYSGSTNYNPSLKSRVTISLDTSKNEFSLKLSSMTAADTAVYYCGRSDRSGNSFVEFDYWGQGTLVTVSS

SEQ ID NO: 27526 - protein, 99 aa, Homo sapiens
TVSGGSISGYFWNWIRQSPGKGLEWIAYIHYSGSTNYNPSLKSRVTISLDTSKNEFSMKLSSMTAADTAVYYCGRSDRSGNSFVEFDYWDQGALVTVSS

SEQ ID NO: 27527 - protein, 99 aa, Homo sapiens; identical to SEQ ID NO: 27524

SEQ ID NO: 27528 - protein, 99 aa, Homo sapiens
TVSGGSISGYYWNWIRQSPGKGLEWIGYIHYSGGTNYNPSLKSRVTISVDTSKNQLSLKLSSVTAADTAVYYCGRSDRSGNSFVEFDYWGQGTLVTVSS

SEQ ID NO: 27529 - protein, 99 aa, Homo sapiens
TVSGGSISGYFWNWIRQSPGKGLEWIAYIHYGGSTNYNPSLKSRVTISLDTSKNEFSMKLSSMTAADTAVYYCGRSDRSGNSFVEFDYWGQGALVTVSS

SEQ ID NO: 27530 - protein, 99 aa, Homo sapiens
TVSGGSISGYFWNWIRQSPGKGLEWIAYIHYSGSTNYNPSLKSRVTISLDTSKNEFSLNLSSMTAADTAVYYCGRSDRSGNSFVEFDYWGQGTLVTVSS

SEQ ID NO: 27531 - protein, 99 aa, Homo sapiens
TVSGGSISGYYWSWIRQSPGNGLEWVAYISNSENSHRNPSLNGRVTISVDTSKNQVSLRLSSVTAADTAVYFCGRSDRSGNSFVEFDYWGQGTLVTVSS

SEQ ID NO: 27532 - protein, 99 aa, Homo sapiens
TVSGGSISGYYWNWIRQSPGKGLEWIGYIHYSGGTNYNPSLKSRVTISLDTSKNQLSLKLSSVTAADTAVYYCGRSDRSGNSFVEFDYWGQGTLVTVSS

SEQ ID NO: 27533 - protein, 99 aa, Homo sapiens; identical to SEQ ID NO: 27525

SEQ ID NO: 27534 - protein, 99 aa, Homo sapiens
TVSGGSISGYYWNWIRHSPGKGLEWIGYIHYSGGTNCNPSLKSRVTISLDTSKNQLSLKLSSVTAADTAVYYCGRSDRSGNSFVEFDYWGQGTLVTVSS

SEQ ID NO: 27535 - protein, 99 aa, Homo sapiens; identical to SEQ ID NO: 27524

SEQ ID NO: 27536 - protein, 99 aa, Homo sapiens; identical to SEQ ID NO: 27525

SEQ ID NO: 27537 - protein, 99 aa, Homo sapiens
TVSGGYIGDHYWNWIRQSPGKGLEWVGHIRYSESTHQNPSLNSRLTLSLDTSKNQISLKLSSVTAADTAVYYCGRSDRSGNSFVEFDYWGQGTLVTVSS

SEQ ID NO: 27538 - protein, 92 aa, Homo sapiens
TVSGDSMDDLYWSWIRQTPGKGLQWIGYVFSSGNTSYNPAFHPRVAISIDTSKNQFSLRLHSVSAADTGMYFCAKFPARGSVSWGPGTWVTV

SEQ ID NO: 27539 - protein, 92 aa, Homo sapiens; identical to SEQ ID NO: 27538

SEQ ID NO: 27540 - protein, 92 aa, Homo sapiens; identical to SEQ ID NO: 27538

SEQ ID NO: 27541 - protein, 92 aa, Homo sapiens
TVSGDSMDDLYWSWIRQTPGKGLQWIGYVFSSGNTSYNPAFHPRVAISIDTSKNQFSLRLHSVSAADTGMYFCAKFPARGSVSWGPRTWVTV

SEQ ID NO: 27542 - protein, 92 aa, Homo sapiens
TVSGDSMDDLYWSWIRQTPGKGLQWIGYVFSSGNTSYNPAFHPRVAISIDSSKSQFSLRLHSVTAADTGMYFCAKFPARGSVSWGPGTWVTV

SEQ ID NO: 27543 - protein, 99 aa, Homo sapiens
AASGFTFSGYWMSWFRQAPGKGLEWVANIKQDGSEQYYVDSLKGRFTISRDNAKNSLYLQMSSLRAEDTAVYYCARDREYGGSHPIDYWGQGTLVTVSS

SEQ ID NO: 27544 - protein, 99 aa, Homo sapiens
AASGFTFSGYWMSWFRQAPGKGLEWVANIKQDGSEQYYVDSLRGRFTISRDNAKKSMYLQMSSLRAEDTAVYYCARDREYGGSHPIDYWGQGTLVTVSS

SEQ ID NO: 27545 - protein, 99 aa, Homo sapiens
AASGFTFSGYWMSWFRQAPGKGLEWVANIKQDGSEQYYVDSLKGRFTISRDNAKNSMYLQMSSLRAEDTAVYYCARDREYGGSHPIDYWGQGTLVTVSS

SEQ ID NO: 27546 - protein, 99 aa, Homo sapiens
AASGFTFSGYWMSWFRQAPWKGLEWVANIKQDGSEQYYVDSLKGRFTISRDNAKNSLYLQMSSLRAEDTAVYYCARDREYGGSHPIDYWGQGTLVTVSS

SEQ ID NO: 27547 - protein, 99 aa, Homo sapiens
AASGFTFSGYWMSWFRQAPGKGLEWVANIKQDGSEQYYVDSLKGRFTISRDNAKKSLYLQMSSLRAEDTAVYYCARDREYGGSHPIDYWGQGTLVTVSS

SEQ ID NO: 27548 - protein, 98 aa, Homo sapiens
ASGFTFSGYWMSWFRQAPGKGLEWVANIKQDGSEQYYVDSLKGRFTISRDNAKKSLYLHMSSLRAEDTAVYYCARDREYGGSHPIDYWGQGTLVTVSS

SEQ ID NO: 27549 - protein, 99 aa, Homo sapiens
AASGFTFSGYWMSWFRQAPGKGLEGVANVKQDGSEQYYVDSLKGRFTISRDNAKNSLYLQMSSLRAEDTAVYYCARDREYGGSHPIDYWGQGTLVTVSS

SEQ ID NO: 27550 - protein, 99 aa, Homo sapiens
AASGFIFSGYWMSWFRQAPGKGLEWVANIKQDGSEQYYVDSLKGRFTISRDNAKKSLYLQMTSLRAEDTAVYYCARDREYGGSHPIDYWGQGTLVTVSS

SEQ ID NO: 27551 - protein, 99 aa, Homo sapiens
AASGFTFSGYWMSWFRQAPGKGLEWVANIKQDGSEQYYVDSLKGRFTISRDNAKKSMYLQMSSLRAEDTAVYYCARDREYGGSHPIDYWGQGTLVTVSS

SEQ ID NO: 27552 - protein, 99 aa, Homo sapiens
AASGFSFSGYWMSWFRQAPGKGLEWVANIKQDGSEQYYVDSLKGRFTISRDNAKKSMYLQMSSLRAEDTAVYYCARDREYGGSHPIDYWGQGTLVTVSS

SEQ ID NO: 27553 - protein, 99 aa, Homo sapiens; identical to SEQ ID NO: 27543

SEQ ID NO: 27554 - protein, 99 aa, Homo sapiens
AASGFTFSGYWMSWFRQAPGKGLEWVANIKQDGSEQYYVDFLRGRFTISRDNAKSSLYLQMSNLRVDDTAVYYCARDREYGGSHPIDYWGQGTLVTVSS

SEQ ID NO: 27555 - protein, 99 aa, Homo sapiens; identical to SEQ ID NO: 27547

SEQ ID NO: 27556 - protein, 99 aa, Homo sapiens; identical to SEQ ID NO: 27543

SEQ ID NO: 27557 - protein, 101 aa, Homo sapiens
TVSGDSISSGGYFWSWIRHHPGKGLEWIAYINYSGSTNHNPSLKSRVTLSVDTSKNQFSLKLSSVTAADTAVYYCARIPYYSSGWGWFDPWGQGTLVTVSS

SEQ ID NO: 27558 - protein, 101 aa, Homo sapiens
TVSGVSISSGDYFWTWIRHHPERGLEWIAWINYRGTTNHNPSLKSRIDISLDRSKNQLSLRLTSVTDADTAVYYCARIPYYSSGWGWFDPWGRGTLVTVSS

SEQ ID NO: 27559 - protein, 101 aa, Homo sapiens
TVSGDSISSGGYFWSWIRHLPGKGLQWIAYINYSGTTNHNPSLKSRVTLSVDTSKNQFSLKLSSVTAADTAVYYCARIPYYSSGWGWFDPWGQGTLVTVSS

SEQ ID NO: 27560 - protein, 96 aa, Homo sapiens
AASGFTFSNYSMNWVRQAPGKGLEWVAFISSGGQFFYYADSVKGRFTISRDNAKNSLYLQMNSLRVEDTAVYYCARDGGTYFLDSWGQGVLVTVSS

SEQ ID NO: 27561 - protein, 96 aa, Homo sapiens
AASGFTFSNYSMNWVRQAPGKGLEWVAFISSGGQFFYYADSVKGRFTISRDNAKNSLYLQMNSLRAEDTAVYYCARDGGTYFLDSWGQGVLVTVSS

SEQ ID NO: 27562 - protein, 96 aa, Homo sapiens
AASGFTFSNYSMNWVRQAPGKGLEWVAFISSGGQFFYYADSVKGRFTISRDNAKNSLYLQMSSLRAEDTAVYYCARDGGTYFLDSWGQGVLVTVSS

SEQ ID NO: 27563 - protein, 96 aa, Homo sapiens
AASGFTFSNYSMKWVRQAPGKGLEWVAFISSGGQFFYYADSVKGRFTISRDNAKNSLYLQMSSLRAEDTAVYYCARDGGTYFLDSWGQGVLVTVSS

SEQ ID NO: 27564 - protein, 96 aa, Homo sapiens
AASGFTFSNYSMNWVRQAPGKGLEWVAFISSGGQFLYYADSVKGRFTISRDNAKNSLYLQMSSLRAEDTAVYYCARDGGTYFLDSWGQGVLVTVSS

SEQ ID NO: 27565 - protein, 96 aa, Homo sapiens
AASGFSFGNYSMTWVRQAPGKGLEWVAFISSGGQFFYYADSLKGRFTISRDNAKNSLYLQMSSLRAEDTAVYYCARDGGTYFLDSWGQGVLVTVSS

SEQ ID NO: 27566 - protein, 96 aa, Homo sapiens
AASGFSFGNYSMTWVRQAPGKGLEWVAFISSGGQFFYYADSLKGRFTISRDNAKNSLYLQMNSLRAEDTAVYYCARDGGTYFLDSWGQGVLVTVSS

SEQ ID NO: 27567 - protein, 96 aa, Homo sapiens; identical to SEQ ID NO: 27566

SEQ ID NO: 27568 - protein, 96 aa, Homo sapiens
AASGFTFSNYSMNWVRQAPGKGLEWVAFISSGGQFSYYADSVKGRFTISRDNAKNSLYLQMSSLRAEDTAVYYCARDGGTYFLDSWGQGVLVTVSS

SEQ ID NO: 27569 - protein, 101 aa, Homo sapiens
KGSGYNFATYWIGWVRQMPGKGLEWMGIIYPGDSDTRYSPSFQGQVTISVDNPTSTAYLQWTSLKASDTAVYYCARPLTDAKVSGGYADYWGQGTLITVSS

SEQ ID NO: 27570 - protein, 101 aa, Homo sapiens
KGSGYNFATYWIGWVRQMPGKGLEWMGIIYPGDSDTRYSPSFQGQVTISVDNPTTTAYLQWTSLKASDTAVYYCARPLTDAKVSGGYADYWGQGTLITVSS

SEQ ID NO: 27571 - protein, 95 aa, Homo sapiens
VSGGSISSDNWWSWVRQPPGKGLEWLGEIYHSGSPNYKPSLKSRLSISVDKSKNHLSLKVNSVTAADTAVYYCARHAGWSGPDSWGQGTLVTVSS

SEQ ID NO: 27572 - protein, 95 aa, Homo sapiens
VSGGSISSDNWWSWVRQPPGKGLEWLGEIYHSGSPNYKPSLKSRLSISVDKSKNHLSLKVNSVTAADTAAYYCARHAGWSGPDSWGQGTLVTVSS

SEQ ID NO: 27573 - protein, 95 aa, Homo sapiens
VSGGSISSDNWWSWVRQPPGKGLEWLGEIYHSESPNYKPSLKSRLTISIDKSKNHLSLKVNSVTAADTAVYYCARHAGWSGPDSWGQGTLVTVSS

SEQ ID NO: 27574 - protein, 96 aa, Homo sapiens
ASGFTFGDYAVSWVRQAPGRGLECVGLITSKTSGIIEYAASVQGRFTVSRDDSKSIAYLHMNSLKTEDTAVYYCARWTGQSYMDVWGKGTTVTVSS

SEQ ID NO: 27575 - protein, 97 aa, Homo sapiens
ASGFTSGDYAMTWVRQAPGKGLECVDLIPGKTSGGILQYAASVEGRFTVSRDDSKSIAYLQMNSLKIEDTAVYYCARWTGQSYMDVWGKGTTVTVSS

SEQ ID NO: 27576 - protein, 97 aa, Homo sapiens
ASGFTSGDYAMTWVRQAPGKGLECVGLIPGKTSGGILQYAASVEGRFTVSRDDSKSIAYLQMNSLKIEDTAVYYCARWTGQSYMDVWGKGTTVTVSS

SEQ ID NO: 27577 - protein, 98 aa, Homo sapiens
TSSGFTFGDYALTWVRQAPGRGLECVGLIRSKSSGGRILYAASVKGRFSVSRDDSKSIGYLQMDSLKTEDTAVYFCARWTGQSYMDVWGKGTTVTVSS

SEQ ID NO: 27578 - protein, 103 aa, Homo sapiens
TVSGGSISSNSHYWGWIRQPPGKGLEWIANVYYDGATAYSPSLRGRVTISVDTSNNQFFLKLTSVTAADTALYFCARVILTTSYMWPDAFDIWGQGTMVTVSS

SEQ ID NO: 27579 - protein, 103 aa, Homo sapiens
TVSGGSISSNSHYWGWIRQPPGKGLEWIANVYYDGATAYSPSLRGRVTISVDMSNNQFFLKLTSVTAADTALYFCARVILTTSYMWPDAFDIWGQGTMVTVSS

SEQ ID NO: 27580 - protein, 103 aa, Homo sapiens
TVSGGSISSNSHYWGWIRQTPGKGLEWIANVYYEGATAYSPSLRGRVTISVDTSNNQFFLRLTSVTAADTALYFCARVILTTSYMWPDAFDIWGQGTMVTVSS

SEQ ID NO: 27581 - protein, 94 aa, Homo sapiens
AASGFSFSDSYMTWIRQAPGRGLEWVSYISGSGGDINYADSVRGRFTVSRDNAKNSVYLQMSSLRAEDTAIYYCSTEPRLLAHWGQGTLVTVSS

SEQ ID NO: 27582 - protein, 94 aa, Homo sapiens
AASGFTFSASYMTWIRQAPGKGLECLSYISGSGTAINYADSVRGRFTVSRDNAKSSLYLQMTSLRAEDTAMYYCSTEPRLLAHWGQGTLVTVSS

SEQ ID NO: 27583 - protein, 94 aa, Homo sapiens
AASGFTFSDSYMTWIRQAPGKGLECLSYISGGGSDINYADSVKGRFTVSRDNARNSLYLQMSSLRAEDTAMYFCSTEPRLLAHWGQGTLVTVSS

SEQ ID NO: 27584 - protein, 97 aa, Homo sapiens
AASGFTVSRYGVHWARQAPGKGLEWVAVTWFDGTNTYARSVMGRFTLSRDTSKNTVYLQMSSLRVEDTAVYYCAKSRDGWNHGLEYWGQGTPVTVSS

SEQ ID NO: 27585 - protein, 97 aa, Homo sapiens
AASGFSLSRYGIHWARQAPGKGLEWVAVTWFDGTNTYADSVRGRFTLSRDTSKSTLYLQMSSLRVEDTAVYYCAKSRDGWNHGLEYWGQGTLVTVSS

SEQ ID NO: 27586 - protein, 104 aa, Homo sapiens
ISGDSVSTNSATWNWVRQSPSRGLEWLGRTSYRSKWETILADSVKSRITINPDTARNQFFLQLNSVTPEDTAVYYCARAGPLVGPFPGNYMAVWGKGTTVTVSS

SEQ ID NO: 27587 - protein, 104 aa, Homo sapiens
ISGDSVSTNSATWNWVRQSPSRGLEWLGRTSYRSKWETILADSVKSRISISPDTARNQFFLQLNSVTPEDTAVYYCARAGPLVGPFPGNYMAVWGKGTTVTVSS

SEQ ID NO: 27588 - protein, 104 aa, Homo sapiens
IYGDSVSSTSATWNWVRLSPSRGLEWLGRTGYRFKWETILADSVKSRITIIPDTARNQFSLQLNSVTPEDSAVYYCARAGPLVGPFPGNYMAVWGKGTTVTVSS

SEQ ID NO: 27589 - protein, 104 aa, Homo sapiens
ISGDSVATNSATWNWIRQSPSRGLEWLGRTSYRSKWETILADSVKGRININPDTARNQFFLQLNFVTPEDTAVYYCARAGPLVGPFPGNYMAVWGKGTTVTVSS

SEQ ID NO: 27590 - protein, 104 aa, Homo sapiens
ISGDSVSTNSATWNWIRQSPSRGLEWLGRTSYRSKWETILADSVKGRISINPDTARNQFFLQLNSVTPEDTAVYYCARAGPLVGPFPGNYMAVWGKGTTVTVSS

SEQ ID NO: 27591 - protein, 104 aa, Homo sapiens; identical to SEQ ID NO: 27586

SEQ ID NO: 27592 - protein, 104 aa, Homo sapiens; identical to SEQ ID NO: 27586

SEQ ID NO: 27593 - protein, 104 aa, Homo sapiens
ISGDSVSSNSATWNWVRQSPSRGLEWLGRTAYRSKWETILADSVKSRITINPDTARNQFFLQLNSVTPEDTAVYYCARAGPLVGPFPGNYMAVWGKGTTVTVSS

SEQ ID NO: 27594 - protein, 104 aa, Homo sapiens
ISGDSVSTNSATWNWVRQSPSRGLEWLGRTSYRSKWETILADSVKSRITISPDTARNQFFLQLNSVTPEDTAVYYCARAGPLVGPFPGNYMAVWGKGTTVTVSS

SEQ ID NO: 27595 - protein, 104 aa, Homo sapiens
ISGDSVSTNSGTWNWVRQSPSRGLEWLGRTSYRSKWETILADSVKSRITINPDTARNQFSLQLNSVTPEDTAVYYCARAGPLVGPFPGNYMAVWGKGTTVTVAS

SEQ ID NO: 27596 - protein, 104 aa, Homo sapiens
ISGDSVSTNSATWNWIRQSPSRGLEWLGRTGYRSKWETILADSVKGRISINPDTARNQFFLQLTSVTPEDTAVYYCARAGPLVGPFPGNYMAVWGKGTTVTVSS

SEQ ID NO: 27597 - protein, 104 aa, Homo sapiens
ISGDSVSTNSATWNWIRQSPSRGLEWLGRTSYRSKWETILADSLKSRISINPDTARNQFSLRLNSVTPEDTAVYYCARAGPLVGPFPGNYMAVWGKGTTVTVSS

SEQ ID NO: 27598 - protein, 104 aa, Homo sapiens
ISGDSVSTNSATWNWIRQSPSRGLEWLGRTSYRSKWETILADSVKSRISINPDTARNQFFLQLNSVTPEDTAVYYCARAGPLVGPFPGNYMAVWGKGTTVTVSS

SEQ ID NO: 27599 - protein, 104 aa, Homo sapiens
ISGDSVSTNSATWNWIRQSPSRGLEWLGRTSYRSKWETILADSVKSRISINPDTARNQFSLRLNSVTPEDTAVYYCARAGPLVGPFPGNYMAVWGKGTTVTVSS

SEQ ID NO: 27600 - protein, 96 aa, Homo sapiens
GASGFIFSSYWMTWVRQAPGKGLEWLASIKADGSVKDYVGSVRGRFTISRDNAKNSVSLKMNSLRVEDTAVYYCSRDDHFYYMDVWGKGTSVTVSS

SEQ ID NO: 27601 - protein, 96 aa, Homo sapiens; identical to SEQ ID NO: 27600

SEQ ID NO: 27602 - protein, 96 aa, Homo sapiens; identical to SEQ ID NO: 27600

SEQ ID NO: 27603 - protein, 102 aa, Homo sapiens
AASGFIFNDYAMTWVRQAPGKGLQWVSTIGASGTKKNYADSVKGRFTISRDNSKNTFDLQMNDLRAEDTAVYFCAKEKWREEDYGDASPVYWGQGVLVTVSS

SEQ ID NO: 27604 - protein, 102 aa, Homo sapiens
AASGFIFNDYAMTWVRQAPGKGLQWVSTIGASGTKKNYADSVKGRFTISRDNSKNTFDLQMNDLRAEDTAVYFCAKEKWREEDYGDASPVYRGQGVLVTVSS

SEQ ID NO: 27605 - protein, 102 aa, Homo sapiens
AASGFIFNDYAMTWVRQAPGKGLQWVSTIGASGTKKNYADSVKGRFTISRDNSKNTFDLQMNDLRAEDTAVYYCAKEKWREEDYGDASPVYWGQGILVTVSS

SEQ ID NO: 27606 - protein, 99 aa, Homo sapiens
VSGLNFSSDWMHWVRQAPGQGLVWVSRIDREGKSKTYVDSVKGRFTTSRDNAKNTLYLQMNSLRVEDTAVYYCTRGWGNSYGYGAFDYWGQGNLVTVSS

SEQ ID NO: 27607 - protein, 99 aa, Homo sapiens
VSGLPFSSDWMHWVRQAPGQGLVWVSRIDREGKSKTYVDSVKGRFTISRDNAKNTLYLQMNSLRVEDTAVYYCTRGWGNSYGYGAFDYWGQGNLVTVSS

SEQ ID NO: 27608 - protein, 99 aa, Homo sapiens
AASGFSFKSHRMNWVRQAPGKGLEWVSSISPNNVIEYADSVKGRFTISRDNAKSSLYLQMNSLRAEDTAVYYCAREDVSLTGYYIFDYWGQGTLVTVSS

SEQ ID NO: 27609 - protein, 100 aa, Homo sapiens
AASGFSFKSHRMNWVRQAPGKGLEWVSSISSTNNVIEYADSVKGRFTISRDNAKSSLYLQMNSLRAEDTAVYYCAREDVSLTGYYIFDYWGQGTLVTVSS

SEQ ID NO: 27610 - protein, 100 aa, Homo sapiens
AASGFMFRSHRMNWVRQAPGKGLEWVSSISSGSTYIEYADSVKGRFTISRDDSENSLYLQMNSLRAEDTAVYYCAREDVSLTGYYIFDYWGQGTLVTVSS

SEQ ID NO: 27611 - protein, 100 aa, Homo sapiens
AASGFSFKSHRMNWVRQAPGKGLEWVSSISSINNVIEYADSVKGRFTISRDNAKNSLYLQMNSLRAEDTAVYYCAREDVSLTGYYIFDYWGQGTLVTVSS

SEQ ID NO: 27612 - protein, 100 aa, Homo sapiens
AASGFSFKSHRMNWVRQAPGKGLEWVSSISSTNNVIEYADSVKGRFTISRDNAENSLYLQMNSLRAEDTAVYFCAREDVSLTGYYIFDYWGQGTLVTVSS

SEQ ID NO: 27613 - protein, 100 aa, Homo sapiens; identical to SEQ ID NO: 27612

SEQ ID NO: 27614 - protein, 95 aa, Homo sapiens
ASGFSFSSSWMTWVRQAPGKGLEWLANIRHDGGVKNYADSLEGRFTISKDNVKKSLYLQMNSLRVEDTAMYYCARDSGSNALDIWGQGTMVTVSS

SEQ ID NO: 27615 - protein, 96 aa, Homo sapiens
AASRFTFSGSWMTWVRQAPGEGLEWVANIKEDGSVKNYVPSVRGRFDISRDNAKNSLFLQMNSLRVEDTALYFCARDSGSNALDIWGQGTMVTVSS

SEQ ID NO: 27616 - protein, 100 aa, Homo sapiens
ATSGFTFDEYAMHWVRQAPGTGLEWVSFISGDGGSTSYADSVRGRFTISRDSTTKSLYLQMNSLRTEDTALYYCTKDRYCTTPRCPLDYWGQGTLVTVSS

SEQ ID NO: 27617 - protein, 100 aa, Homo sapiens
ATSGFTFDEYAMHWVRQVPGTGLEWVSFISGDGGSTSYADSVRGRFTISRDSTTKSLYLQMNSLRTEDTALYYCTKDRYCTTPRCPLDYWGQGTLVTVSS

SEQ ID NO: 27618 - protein, 100 aa, Homo sapiens
ATSGFTFDEYAMHWVRQAPGMGLEWVSFISGDGGSTSYADSVRGRFTISRDSTTKSLYLQMNSLRTEDTALYYCTKDRYCTTPRCPLDYWGQGTLVTVSS

SEQ ID NO: 27619 - protein, 100 aa, Homo sapiens
ATSGFTFDEYAMHWVRQAPGTGLEWVSFISGDGGSTSYADSVKGRFTISRDSTTKSLYLQMNSLRTEDTALYYCTKDRYCTTPRCPLDYWGQGTLVTVSS

SEQ ID NO: 27620 - protein, 100 aa, Homo sapiens
ATSGFTFDEYAMHWVRQAPGTGLEWVSFISGDGGSTSYADPVRGRFTISRDSTTKSLYLQMNSLRTEDTALYYCTKDRYCTTPRCPLDYWGQGTLVTVSS

SEQ ID NO: 27621 - protein, 100 aa, Homo sapiens; identical to SEQ ID NO: 27617

SEQ ID NO: 27622 - protein, 103 aa, Homo sapiens
ATSGFTFSSSWIYWVRQGPGKGLQWVSSINNDGSSTRYAESVKGRFTMSRDNAENTAYLQMSNLRADDTGVYYCARPTKFYYDPDFGNYMGVWGSGTTVTVSS

SEQ ID NO: 27623 - protein, 103 aa, Homo sapiens
ATSGFTFSSSWIYWVRQAPGKGLQWVSSIDNDGSSPRYAESVKGRFTMSRDNAENTAYLQMTNLRADDTGVYYCARPTKFYYDPDFGNYMGVWGSGTTVTVSS

SEQ ID NO: 27624 - protein, 103 aa, Homo sapiens
ATSGFTFSSSWMYWVRQAPGKGLQWVSSISNDGSSTRYADSVKGRFIMSRDNAENTVYLQMSDLRADDTGVYYCARPTKFYYDPDFGNYMGVWGSGNTVTVSS

SEQ ID NO: 27625 - protein, 103 aa, Homo sapiens
ATSGFTFSSSWIYWVRQRPGKGLQWVSSINNDGSSTRYAESVKGRFTMSRDNAENTAYLQMSNLRADDTGVYYCARPTKFYYDPDFGNYMGVWGSGTTVTVSS

SEQ ID NO: 27626 - protein, 103 aa, Homo sapiens
GTSGFTFSSSWMYWVRQVPGKGLEWVASISNDGSSTRYADSVKGRFTISRDNAENTLYLQMNSLRGDDTATYYCARPTKFYYDPDFGNYMGVWGSGTKVTVSS

SEQ ID NO: 27627 - protein, 103 aa, Homo sapiens
ATSGFTFSSSWMYWVRQVQGKGLEWVASISHDGSSTRYADSVKGRFTISRDNAENTLYLLMNRLSGDDTATYYCARPTKFYYDPDFGNYMGVWGSGTTVTVSS

SEQ ID NO: 27628 - protein, 103 aa, Homo sapiens
ATSGFTFSSSWMYWVRQVQGKGLEWVASISHDGSSTRYADSVKGRFTISRDNAENTLYLLMNRLRGDDTATYYCARPTKFYYDPDFGNYMGVWGSGTTVTVSS

SEQ ID NO: 27629 - protein, 103 aa, Homo sapiens; identical to SEQ ID NO: 27623

SEQ ID NO: 27630 - protein, 96 aa, Homo sapiens
AASGLNFRSYGMHWVRQAPGKGLEWVAVIWYDEVNIYYADSVKGRFTISRDNSRNMLYLQMNNLRVEDTAVYYCAGAEAEGWFDPWGQGTLVTVSS

SEQ ID NO: 27631 - protein, 96 aa, Homo sapiens
EASGFSLSSYGMHWVRQAPGKGLEWVADIWYDGTKKYYADSVKGRFTISRDTSKNTLFLQMSNLRAEDTAVYYCAGAEAEGWFDPWGRGTLVTVSS

SEQ ID NO: 27632 - protein, 102 aa, Homo sapiens
TGDSVTSDTASWNWIRQSPSRGLEWLGRTYYRSQWSQWYTEYGDSVRSRMRINADTSKNQFSLHLNSVTPEDTAVFFCARSRDHDIFGFGHWGQGSLVTVSS

SEQ ID NO: 27633 - protein, 99 aa, Homo sapiens
SGDSVTSDTASWNWIRQSPSRGLEWLGRTYYRSQWFTEYADSVKSRMSISADTSKNQFSLQVYSVTPEDTAVFYCARSRDHDIFGFGHWGQGSLVTVSS

SEQ ID NO: 27634 - protein, 99 aa, Homo sapiens
SGDSVTSDTASWNWIRQSPSRGLEWLGRTYYRSMWFTEYAGSFEGRMRISADASRNQFSLQVFSAAAEDTAVFYCARSRDHDIFGFGHWGQGSRVTVSS

SEQ ID NO: 27635 - protein, 101 aa, Homo sapiens
SVSGGSMAGYYWSWIRQSPGKGLEWLGYMSYIGTTHYYPSFASRVTMSLDTSRNQFSLRLGSVTAADTAVYYCGRVGHKGNLGISRFVDVWGRGTTVTVSS

SEQ ID NO: 27636 - protein, 101 aa, Homo sapiens
SVSGGSMAGYYWSWIRQSPGKGLEWLGYMAYSGTTHYYPSLASRVTMSLDTSRNQFSLRLGSVTAADTAVYYCGRVGHKGNLGISRFVDVWGRGTTVTVSS

SEQ ID NO: 27637 - protein, 99 aa, Homo sapiens
AGSGFTFSNAWMDWVRQAPGKGLEWVGRIKSKTDGGIKDYAAPVKGRFTISRDDSKDTLYLEMNSLKTEDTAVYYCTARHYYDNMFDVWGQGALVTVSS

SEQ ID NO: 27638 - protein, 99 aa, Homo sapiens; identical to SEQ ID NO: 27637

SEQ ID NO: 27639 - protein, 99 aa, Homo sapiens; identical to SEQ ID NO: 27637

SEQ ID NO: 27640 - protein, 99 aa, Homo sapiens; identical to SEQ ID NO: 27637

SEQ ID NO: 27641 - protein, 99 aa, Homo sapiens
AGSGFTFTNAWMDWVRQAPGKGLEWVGRIKSKTDGGIKDYAAPVKGRFTISRDDSKDTLYLEMDSLKTEDTAVYYCTARHYYDNMFDVWGQGTLVTVSS

SEQ ID NO: 27642 - protein, 99 aa, Homo sapiens
AGSGFTFSNAWMDWVRQAPGKGPEWVGRIKSKTDGGIKDYAAPVKGRFTITRDDSKDTLYLEMNSLKTEDTAVYYCTARHYYDNMFDVWGQGALVTVSS

SEQ ID NO: 27643 - protein, 99 aa, Homo sapiens
TVSGGSIRTYYWSWIRQPPGEGLEWIGCFHYSGSTNYNPSLKSRVTILVDTSKNQFSLKLSSVTAADTAVYYCARHLSYGYNTHTFDFWGQGTMATVSS

SEQ ID NO: 27644 - protein, 99 aa, Homo sapiens; identical to SEQ ID NO: 27643

SEQ ID NO: 27645 - protein, 99 aa, Homo sapiens; identical to SEQ ID NO: 27643

SEQ ID NO: 27646 - protein, 99 aa, Homo sapiens
TVSGGSIRTYYWSWIRQPPGEGLEWIGCFHYSGSTNYNPSLKSRVTILVDTSKNQFSLKLSSVTAAYTAVYYCARHLSYGYNTHTFDFWGQGTMATVSS

SEQ ID NO: 27647 - protein, 100 aa, Homo sapiens
ASGNIFSTDDVNWVRQAPGQGLEWMGWVNPNSGDSGFEQKFQGRINMAWNTSIGTVYMELSSLRSEDTATYYCATGGYSGSYYERPPDVWGQGTVVTVSS

SEQ ID NO: 27648 - protein, 100 aa, Homo sapiens
ASGNIFSTDDVNWVRQAPGQGLEWMGWVNPNSGDSGFEQKFQGRINMAWNTSIGTVHMELSSLRSEDTATYYCATGGYSGSYYERPPDVWGQGTVVTVSS

SEQ ID NO: 27649 - protein, 100 aa, Homo sapiens
ASGNIFSTDDVNWVRQAPGQGLEWMGWVNPNSGDSGYEQKFQGRINMAWNTSIGTVYMELSSLRSEDTAIYYCATGGYSGSYYERPPDVWGQGTVVTVSS

SEQ ID NO: 27650 - protein, 97 aa, Homo sapiens
AASGFTFRNFGMHWVRQAPGKGLEWVALIWYDGSKTYYGDSVKGRFTISRDDSENTLYLEINSLRAEDTALYYCARDDPNSGSIDSWGQGTLVTVSS

SEQ ID NO: 27651 - protein, 97 aa, Homo sapiens
AASGFTFRNFGMHWVRQAPGKGLEWVALIWYDGSKTYYGDSVKGRFTISRDDSQNTLYLEINSLRAEDTALYYCARDDPNSGSIDSWGQGTLVTVSS

SEQ ID NO: 27652 - protein, 97 aa, Homo sapiens
ATSGFTFRNFGMHWVRQAPGKGLEWVALIWYDGSKTYYGDSVKGRFTISRDDSKNTLYLEVNSLRAEDTALYYCARDDPNSGSIDSWGQGTLVTVSS

SEQ ID NO: 27653 - protein, 97 aa, Homo sapiens; identical to SEQ ID NO: 27650

SEQ ID NO: 27654 - protein, 97 aa, Homo sapiens
AASGFTFRNLGMHWVRQAPGKGLEWVALIWYDGSKTYYGDSVKGRFTISRDDSENTLYLEINSLRAEDTALYYCARDDPNSGSIDSWGQGTLVTVSS

SEQ ID NO: 27655 - protein, 97 aa, Homo sapiens
AASGFTFRNFGMHWVRQAPGKGLEWVALIWYDGSKTYYGDSVKGRFTISRDDSKNTLYLEINSLRAEDTALYYCARDDPNSGSIDSWGQGTLVTVSS

SEQ ID NO: 27656 - protein, 97 aa, Homo sapiens; identical to SEQ ID NO: 27650

SEQ ID NO: 27657 - protein, 97 aa, Homo sapiens
AASGFTFRNFGMHWVRQAPGKGLEWVALIWYDGSQTYYGDSVKGRFTISRDDSENTLYLQINSLRAEDTALYYCARDDPNSGSIDSWGQGTLVTVSS

SEQ ID NO: 27658 - protein, 98 aa, Homo sapiens
TVSGGSINSGGYYWSWIRQHPGKGLEWIGDIYYSGSTYYNPSLKSRVTISVDTSKNQFSLKLSSVTAADTAVYYCARDSNTWSALEYWGQGTLVTVSS

SEQ ID NO: 27659 - protein, 98 aa, Homo sapiens
NVSGDSISSGGYYWTWIRQHPGKGLEWIGYIFSSGRTYYNPSLKSRVTISVDTSKNQFSLKLSSVTAADTAVYYCARDSNTWSALEYWGQGTLVTVSS

SEQ ID NO: 27660 - protein, 98 aa, Homo sapiens
TVSGVSMNSGGYYWSWIRQFPGKGLEFIGDIYYSGSTYYNPSLKSRVSISVDLSKNQFSLNLSAVTAADTAVYYCARDSNTWSALEYWGQGILVTVSS

SEQ ID NO: 27661 - protein, 97 aa, Homo sapiens
AASGFTFSNYGMHWVRQAPGKGLEWVAIIWYDGSNIYYADSVKGRFTISRDNSNNTLYLQMNSLRAEDTALYYCAREPAGTYSFDYWGQGTLVTVSS

SEQ ID NO: 27662 - protein, 97 aa, Homo sapiens
AASGFTFRNYGMHWVRQAPGKGLEWVALIWYDGSNKYYADSVKGRFTISRDNSENTLYLQMNSLRAEDTAVYYCAREPAGTYSFDYWGQGTLVTVSS

SEQ ID NO: 27663 - protein, 97 aa, Homo sapiens
ATSGFTFSNYGMHWVRQAPGKGLEWVAIIWYDGSNKYYADSVKGRFTISRDNSKNTLYLQMNSLRAEDTAMYYCAREPAGTYSFDYWGQGTLVTVSS

SEQ ID NO: 27664 - protein, 97 aa, Homo sapiens
AASGFTFSNYGMHWVRQAPGKGLEWVAIIWYDGTNKYYADSLKGRFTISRDNSKNTLYLQMNSLRAEDTAVYYCAREPAGTYSFDYWGQGTLVTVSS

SEQ ID NO: 27665 - protein, 97 aa, Homo sapiens
AASGFTFRNYGMHWVRQAPGKGLEWMALIWYDGSNKYYADSVKGRFTISRDNSENTLYLQMNSLRAEDTAVYYCAREPAGTYSFDYWGQGTLVTVSS

SEQ ID NO: 27666 - protein, 97 aa, Homo sapiens
AASGLTFSNYGMHWVRQAPGKGLEWVAIIWYDGSNIYYADSVKGRFTISRDNSNNTLYLQMNSLRAEDTALYYCAREPAGTYSFDYWGQGTLVTVSS

SEQ ID NO: 27667 - protein, 97 aa, Homo sapiens; identical to SEQ ID NO: 27662

SEQ ID NO: 27668 - protein, 97 aa, Homo sapiens; identical to SEQ ID NO: 27661

SEQ ID NO: 27669 - protein, 97 aa, Homo sapiens
AASGFTFSNYGMHWVRQAPGKGLEWVAIIWYDGTNKYYADSVKGRFTISRDNSENTLYLQMNTLRAEDTAVYYCAREPAGTYSFDYWGQGTLVTVSS

SEQ ID NO: 27670 - protein, 97 aa, Homo sapiens
AASGFTFRNYGMHWVRQAPGKGLEWVALIWYDGSNKYYVDSVKGRFTISRDNSENTLYLQMNSLRAEDTAVYYCAREPAGTYSFDYWGQGTLVTVSS

SEQ ID NO: 27671 - protein, 97 aa, Homo sapiens
AASGFTFSNYGMHWVRQAPGKGLEWVAIIWYDGSNIYYADSAKGRFTISRDNSNNTLYLQMYSLRAEDTALYYCAREPAGTYSFDYWGQGTLVTVSS

SEQ ID NO: 27672 - protein, 97 aa, Homo sapiens
AASGFTFRNYGMHWVRQAPGKGLEWVAIIWYDGTVKHYADSVRGRFTISRDNSNNTLYLQMDSLRAEDTAVYFCAREPAGTYSFDYWGQGILVTVSS

SEQ ID NO: 27673 - protein, 97 aa, Homo sapiens
AASGFTFRNYGMHWVRQAPGKGLEWVAIIWYDGSHEYYADSVKGRFTISRDNSNNTLYLQMNSLRAEDTAVYYCAREPAGTYSFDYWGQGTLVTVSS

SEQ ID NO: 27674 - protein, 97 aa, Homo sapiens
AASGFTFRNYGMHWVRQAPGKGLEWVAIIWYDGSNEYYADSVKGRFTISRDNSENTLYLQMNNLRVEDTAVYYCAREPAGTYSFDYWGQGTLVTVSS

SEQ ID NO: 27675 - protein, 97 aa, Homo sapiens
AASGFTFRNYGMHWVRQAPGKGLEWVAIIWYDGTVKHYADSVRGRFTISRDNSNNTLYLQMDSLRAEDTAVYFCAREPAGTYSFDYWGQGTLVTVSS

SEQ ID NO: 27676 - protein, 97 aa, Homo sapiens
AASGFTFRNYGMHWVRQAPGKGLEWVAIIWYDGSNKYYADSVKGRFTISRDNSENTLYLQMNSLRTEDTAVYYCAREPAGTYSFDYWGQGTLVTVSS

SEQ ID NO: 27677 - protein, 97 aa, Homo sapiens
ASGFAFSDYAMTWIRQAPGKGLEWVSMISGSGFTIYYADSMKGRVTISRDNSKNTVDLQMNSLRAEDTAVYYCAKAGGNTIYWYDFWGQGTLVTVSS

SEQ ID NO: 27678 - protein, 97 aa, Homo sapiens
ASGFAFSDYAMTWIRQAPGKGLEWVSMISGSGFTIYYPDSMKGRVTISRDNSKNTVDLQMKSLRAEDTAVYYCAKAGGNTIYWYDFWGQGTLVTVSS

SEQ ID NO: 27679 - protein, 97 aa, Homo sapiens
ASGFAFSDYAMTWIRQAPGKGLEWVSMISGSGYTIYYPDSLKGRVTISRDNSKNTVDLHMNSLRAEDTAVYYCAKAGGNTIYWYDFWGQGTLVTVSS

SEQ ID NO: 27680 - protein, 97 aa, Homo sapiens
ASGFAFSDYAMTWIRQAPGKGLEWVSMISGSGYTIYYPDSMKGRVTISRDNSKNTVDLQMNSLRVEDTAIYYCAKAGGNTIYWYDFWGQGTLVTVSS

SEQ ID NO: 27681 - protein, 94 aa, Homo sapiens
SASGLTFSVSTMYWVRQAPAKGLEYVSAITNGDRTYYRDSVKGRFTISRDDSKNTLYLQMNSLRPEDTAVYYCVKDPGPLFVTRGQGILVTVSS

SEQ ID NO: 27682 - protein, 94 aa, Homo sapiens
SASGLTFSVSTMYWVRQAPAKGLEYVSAITNGDITYYRDSVQGRFTISRDYSTNTLYLQMNSLRPEDTAVYYCVKDPGPLFVTGGQGIPVTVSS

SEQ ID NO: 27683 - protein, 95 aa, Homo sapiens
SASGLTFSVSTMYWVRQAPAKGLEYVSAITSNGDSTYYTDSVRGRFTISRDNSKNTLYLQMNSLRPEDTAVYYCVKDPGPLFVTRGQGILVTVSS

SEQ ID NO: 27684 - protein, 95 aa, Homo sapiens
SASGLTFSVSTMYWVRQAPAKGLEYVSAITSNGESTYYTDSVTGRFTISRDNSKNTLYLQMNSLRPEDTAVYYCVKDPGPLFVTRGQGILVTVSS

SEQ ID NO: 27685 - protein, 98 aa, Homo sapiens
AASGFTFSSYSMNWVRQAPGKGLEWVSYISRTSSATLYADSVKGRFTISRDNAKNSLYLQMNSLRDEDTAVYYCAREAPVGASTTDYWGQGTLVTVSS

SEQ ID NO: 27686 - protein, 98 aa, Homo sapiens
AASGFTFSSYSMNWVRQAPGKGLEWVSYISRSSSAILYADSVKGRFTISRDNAKNSLYLQMNSLRDEDTAVYYCAREAPVGASTTDYWGQGTLVTVSS

SEQ ID NO: 27687 - protein, 98 aa, Homo sapiens
AASGFTFSSYSMNWVRQAPGKGLEWVSYISRSSSAILYADSVKGRFTISRDNARNSLYLQMNSLRDEDTAVYYCAREAPVGASTTDYWGQGTLVTVSS

SEQ ID NO: 27688 - protein, 98 aa, Homo sapiens
AASGFTFSSYSMNWVRQAPGKGLEWISYISRSSSAILYADSVKGRFTISRDNAKNSLYLQMNSLSDEDTAVYYCAREAPVGASTTDYWGQGTLVTVSS

SEQ ID NO: 27689 - protein, 98 aa, Homo sapiens
AASGFTFSSYSMNWVRQAPGKGLEWVSYISRTSSAILYADSVKGRFTISRDNAKNSLYLQMNSLRDEDTAVYYCAREAPVGASTTDYWGQGTLVTVSS

SEQ ID NO: 27690 - protein, 98 aa, Homo sapiens; identical to SEQ ID NO: 27686

SEQ ID NO: 27691 - protein, 98 aa, Homo sapiens
AASGFTFSSYSMNWVRQAPGKGLEWVSYITRTSSVTLYADSVKGRFTISRDNAKNSLFLQMNSLRDEDTAIYYCAREAPVGASTTDYWGQGTLVTVSS

SEQ ID NO: 27692 - protein, 98 aa, Homo sapiens
AASGFTFSSYSMNWVRQAPGKGLEWVSYINRGSSAIFYADSVKGRFTISRDNAKNSLYLQMNNLREEDTAVYYCAREAPVGASTTDYWGQGTLVTVSS

SEQ ID NO: 27693 - protein, 98 aa, Homo sapiens; identical to SEQ ID NO: 27686

SEQ ID NO: 27694 - protein, 98 aa, Homo sapiens
AASGFTFSSYSMNWVRQAPGKGLEWVSYINRGSSAILYADSVKGRFTISRDNAKNSLYLQMNNLREEDTAVYYCAREAPVGASTTDYWGQGTLVTVSS

SEQ ID NO: 27695 - protein, 97 aa, Homo sapiens
VGSGFTFSRHDMSWLRQAPGKGLEWVSLIRSASTNTHYADSVKGRFTISRDNSRSTLYLQMNDLRVEDTAIYYCAKGETEPRPFDRWGQGTLVSVSS

SEQ ID NO: 27696 - protein, 97 aa, Homo sapiens
AASGFTFSNHDMSWLRQAPGKGLEWVSLIRSANTNTHYVDSVKGRFTISRDNSKSTLYLQMNSLRAEDTAIYYCAKGETEPRPFDRWGQGTLVTVSS

SEQ ID NO: 27697 - protein, 97 aa, Homo sapiens
TVSGGSINAFYWSWIRQSPGGRLEWLGYVYDGGKTTYNPSLESRVTISMGTSQSEFSLRMTSVTAADTAVYYCATSGGLTGRYFDHWGQGTPVTVSS

SEQ ID NO: 27698 - protein, 97 aa, Homo sapiens
TVSGGSINAFYWSWIRQPPGGRLEWLGYVYDGGKTTYNPSLQSRVTISVGTSQNEFSLRMTSVTAADTAVYYCATSGGLTGRYFDHWGQGTPVTVSS

SEQ ID NO: 27699 - protein, 98 aa, Homo sapiens
AASGFTFSNYWMHWARQAPGEGLVWISRIRGDGSDMSYADSVRGRFTISRDNAKNTLYLQMNSLTVDDTAVYYCARHGDYAAHAFDVWGQGTMVTISS

SEQ ID NO: 27700 - protein, 98 aa, Homo sapiens
AASGFTFSNYWMHWARQAPGEGLVWISRIRGDGSDMSYADSVRGRFTISRDNAKNTLYLQMNSLTVDDTAVYYCARHGDYAAHAFDVWGQGTMVTVSS

SEQ ID NO: 27701 - protein, 98 aa, Homo sapiens
AASGFTFSNYWMHWARQVPGEGLVWISRIRGDGSDMSYADSVRGRFTISRDNAKNTLYLQMNSLTVDDTAVYYCARHGDYAAHAFDVWGQGTMVTVSS

SEQ ID NO: 27702 - protein, 98 aa, Homo sapiens; identical to SEQ ID NO: 27700

SEQ ID NO: 27703 - protein, 94 aa, Homo sapiens
TVSGGSISSYYWSWIRQPPGKGLEWIGYIYYSGSTNYNPSLKSRVTISVDTSKNQFSLKLSSVTAADTAVYYCARHVGSGMDVWGKGTTVTVSS

SEQ ID NO: 27704 - protein, 94 aa, Homo sapiens
TVSGGSISSYYWSWIRQPPGKGLEWIGYIYYSGSTNYNPSLKSRVTISVDTSKNQFSLKVSSVTAADTAVYYCARHVGSGMDVWGKGTTVTVSS

SEQ ID NO: 27705 - protein, 93 aa, Homo sapiens
VYGGSFSGYYWSWIRQPPGKGLEWIGYIYYSGSTNYNPSLKSRVTISVDTSKNQFSLKLSSVTAADTAVYYCARHVGSGMDVWGKGTTVTVSS

SEQ ID NO: 27706 - protein, 94 aa, Homo sapiens
TVSGGSISSYYWSWIRQPPGKGLEWIGYVYFSGGTNYNPSLTSRVTISIDTSKNQFSLNLTSVTAADTAVYYCARHVGSGMDVWGKGTTVTVSS

SEQ ID NO: 27707 - protein, 94 aa, Homo sapiens
TVSGGSISSYYWSWIRQPPGKGLEWIGYIYPSGSTNYNPSLKNRVTISVDTSKNQFSLKLTSVTAADTAVYYCARHVGSGMDVWGKGTTVTVSS

SEQ ID NO: 27708 - protein, 94 aa, Homo sapiens
TVSGGSISSYYWSWVRQPPGKGLEWIGYIYYSGSTNYNPSLSSRITISLDTSNNQFSLRLSSVTAADSAVYYCARHVGSGMDVWGKGTTVTVSS

SEQ ID NO: 27709 - protein, 96 aa, Homo sapiens
GASGFDFSGSGMHWFRQAPGKGLEWVALISYEGRTTNYAASVMGRFTISRDNSKNTVSLKMKNLRPEDTGVYFCAKERGLGVFDNWGQGARVTVSS

SEQ ID NO: 27710 - protein, 95 aa, Homo sapiens
ASGFDFSDSGMLWVRQAPGKGLEWVSLISYGGATTNYADFVKGRFTISRDNSKNTVSLEMKNLRPEDTGVYFCAKERGLGVFDNWGQGARVIVSS

SEQ ID NO: 27711 - protein, 97 aa, Homo sapiens
AASGFTFSNYAMQWVRQAPGRGLEWLAVISNGGTLIFYADSVKGRFTISRDNSNNKVYLQVDDLKPEDTAVFYCARELTRTGNLDYWGQGALVIVSS

SEQ ID NO: 27712 - protein, 97 aa, Homo sapiens
AASGFTFSNYAMQWVRQAPGRGLEWLAVVSRDGGLIYYADSVKGRFTISRDNSKNTLYLQMNSLRPDDTAVFYCARELTRTGNLDYWGQGVLVSVSS

SEQ ID NO: 27713 - protein, 100 aa, Homo sapiens
AASGFTFSTYAMSWVRHFPGKGVEWVAAIDAGRPGTHYADSVKGRFTISRDDSRNTLSLLLNSLRADDTAIYYCARPGLTVAHTRWFDLWGQGALVTVSS

SEQ ID NO: 27714 - protein, 100 aa, Homo sapiens
AASGFAFSTYAMSWVRHLPGKGVEWVAAIDAGRPGTHYADSVKGRFTISRDDSRNTLSLLLSSLRADDTGTYYCARPGLTVAHTRWFDLWGQGALVTVSS

SEQ ID NO: 27715 - protein, 100 aa, Homo sapiens
AASGFTFSTYAMSWVRHLPGKGVEWVAAIDAGRPGTHYADSVKGRFTISRDDSRNTLSLLLNSLRADDTAIYYCARPGLTVAHTRWFDLWGQGALVTVSS

SEQ ID NO: 27716 - protein, 100 aa, Homo sapiens; identical to SEQ ID NO: 27715

SEQ ID NO: 27717 - protein, 94 aa, Homo sapiens
APSGFMFRDFWMMWVRQAPGKGLEWMANINPDGSDKYYVDSVKGRFTVSRDNTKNLLYLQMNSLRADDTAVYYCARGQTWAYYWGQGTLVTVSS

SEQ ID NO: 27718 - protein, 94 aa, Homo sapiens; identical to SEQ ID NO: 27717

SEQ ID NO: 27719 - protein, 94 aa, Homo sapiens
APSGFMFRDFWMMWVRQAPGKGLEWVANINPDGSDKYYVDSVKGRFTVSRDNTKNLLYLQMNSLRADDTAVYYCARGQTWAYYWGQGTLVTVSS

SEQ ID NO: 27720 - protein, 100 aa, Homo sapiens
AASGFTFSDYTMNWVRQAPGKGLEWVSSISSGGTYIYDADSVKGRFTISRDDSKNSLYLQLSSLRAEDTAVYYCARDCSITSCYGIFDYWGQGTLVAVSS

SEQ ID NO: 27721 - protein, 99 aa, Homo sapiens
AASGFTFSDYTMNWVRQAPGKGLEWVSSISSGGTYIYDADSVKGRFTISRDDSKNSLYLQLSSLRAEDTAVYYCARDCSITSCYGIFDYWARGPWSPSP

SEQ ID NO: 27722 - protein, 100 aa, Homo sapiens
AASGFTFSDYTMNWVRQAPGKGLEWVSSISSGGTYIYDADSVKGRFTISRDDSKNSLYLQLSSLRAEDTAVYYCARDCSITSCYGIFDYWGQGTLVTVSS

SEQ ID NO: 27723 - protein, 97 aa, Homo sapiens
AASGFTLSGYWMSWVRQAPGKGLEWVANIRQDGSEEYYLDSVTGRFTISRDNDRNSLYLQMNSLRAEDTAVYYCVRDWSGYSYFDYWGPGALVTVSS

SEQ ID NO: 27724 - protein, 97 aa, Homo sapiens
AATGFTLSSYWMSWVRQAPGKGLEWVANIRQDGSEEYYADSVTGRFTISRDNDKNSVFLQMNTLRAEDTAVYYCVRDWSGYSYFDYWGQGTMVTVSS

SEQ ID NO: 27725 - protein, 97 aa, Homo sapiens
AASGFTLSGYWMSWVRQVPGKGLEWVANIRQDGSEEYYLDSVTGRFTISRDNDRNSLYLQMNSLRAEDTAVYYCVRDWSGYSYFDYWGPGALVTVSS

SEQ ID NO: 27726 - protein, 102 aa, Homo sapiens
AASGFTFSGSAIHWVRQASGKGLEWVGRIRSKANRYATTYAASVDGRFTISRDDSKNTAYLQMNSLKTEDTAVYYCTNLLTNPHYYYNVDVWGKGTTVTVSS

SEQ ID NO: 27727 - protein, 102 aa, Homo sapiens
AASGFTFSGSAIHWVRQASGKGLEWVGRIRSKANRYATTYAASVDGRFTISRDDSKNTAYLQMNSLKTEDMAVYYCTNLLTNPHYYYNVDVWGKGTTVTVSS

SEQ ID NO: 27728 - protein, 102 aa, Homo sapiens; identical to SEQ ID NO: 27726

SEQ ID NO: 27729 - protein, 102 aa, Homo sapiens
AASGFTFSGSAIHWVRQASGKGLEWVGRIRSKVNRYATTYAASVDGRFTISRDDSKNTAYLQMNSLKTEDTAVYYCTNLLTNPHYYYNVDVWGKGTTVTVSS

SEQ ID NO: 27730 - protein, 102 aa, Homo sapiens
AVSGLNFDDAWLSWVRQAPGKGLEWVAQIKSKSYRGKPDYAAPVRGRFTISRDDSKTTVYLQMNSLKTEDTAVYYCTSDVYLRGSYFYMDVWGKGTAVTVSS

SEQ ID NO: 27731 - protein, 102 aa, Homo sapiens; identical to SEQ ID NO: 27730

SEQ ID NO: 27732 - protein, 101 aa, Homo sapiens
VSGLNFDDAWLSWVRQAPGKGLEWVAQIKSKSYRGKPDYAAPVRGRFTISRDDSKTTVYLQMNSLKTEDTAVYYCTSDVYLRGSYFYMDVWGKGTAVTVSS

SEQ ID NO: 27733 - protein, 100 aa, Homo sapiens
AASGFAFSGSVMHWVRQASGKGLEWVGQITIKAGNYATSYGASQKGRFTISRDDSKNTAYLQMNSLKTEDTAVYYCTRSDPAYYNAGSIWGQGTRVTVSS

SEQ ID NO: 27734 - protein, 100 aa, Homo sapiens; identical to SEQ ID NO: 27733

SEQ ID NO: 27735 - protein, 100 aa, Homo sapiens
AASGFAFSGSVMHWVRQASGKGLEWVGQITIKAHNYATSYGASQKGRFTISRDDSKNTAYLQMNSLKTEDTAVYYCTRSDPAYYNAGSIWGQGTRVTVSS

SEQ ID NO: 27736 - protein, 100 aa, Homo sapiens
AASGFAFSGSVMHRVRQASGKGLEWVGQITIKAHNYATSYGASQKGRFTISRDDSKNTAYLQMNSLKTEDTAVYYCTRSDPAYYNAGSIWGQGTRVTVSS

SEQ ID NO: 27737 - protein, 102 aa, Homo sapiens
EASGFTFKTYWMSWVRQAPGRGLEWVANIKQDGSEKNYVDSVKGRFTISRDNAKNSLYLQVNSLRAEDTAVYYCARDQSGGYFWNHGYFDYWGRGTLVTVSS

SEQ ID NO: 27738 - protein, 102 aa, Homo sapiens; identical to SEQ ID NO: 27737

SEQ ID NO: 27739 - protein, 102 aa, Homo sapiens; identical to SEQ ID NO: 27737

SEQ ID NO: 27740 - protein, 100 aa, Homo sapiens
AVSGVTISSYGMHWVRQAPGKGLEWVAVISNDGSNKYYADSVKGRFTISRDNPKNTLYLQMNGLRTEDTAVYYCAKDRYCGRDRCPVDYWGQGTLVTVSS

SEQ ID NO: 27741 - protein, 100 aa, Homo sapiens; identical to SEQ ID NO: 27740

SEQ ID NO: 27742 - protein, 100 aa, Homo sapiens; identical to SEQ ID NO: 27740

SEQ ID NO: 27743 - protein, 100 aa, Homo sapiens; identical to SEQ ID NO: 27740

SEQ ID NO: 27744 - protein, 100 aa, Homo sapiens
AVSGVTISSYGMHWVRQAPGKGLEWVALISNDGSNKYYADSVKGRFTISRDNPKNTLYLQMNGLRTEDTAVYYCAKDRYCGRDRCPVDYWGQGTLVTVSS

SEQ ID NO: 27745 - protein, 100 aa, Homo sapiens
AVSGLTISSYGMHWVRQAPGKGLEWVALISNDGSNKYYADSVKGRFTISRDNPKNTLYLQMNGLRTEDTAVYFCAKDRYCGRDRCPVDYWGQGTLVTVSS

SEQ ID NO: 27746 - protein, 96 aa, Homo sapiens
ASGYTFTNNDIHWVRQAPGQGLEWMAKISPSNGDTDYAQKFQGRVTVTRDTSTSTVYLELRSLTSEDTAIYYCGRDLVGGWSLDYWGQGTLVTVSS

SEQ ID NO: 27747 - protein, 96 aa, Homo sapiens; identical to SEQ ID NO: 27746

SEQ ID NO: 27748 - protein, 96 aa, Homo sapiens; identical to SEQ ID NO: 27746

SEQ ID NO: 27749 - protein, 99 aa, Homo sapiens
TVSGGSISSGDYYWSWIRQPPGKGLEWIGYIYNSGSTYYNPSLRSRITISVDTSKNQFSLKVNSVTAADTAVYYCARGGWGRLGYFDYWGQGALVTVSS

SEQ ID NO: 27750 - protein, 99 aa, Homo sapiens; identical to SEQ ID NO: 27749

SEQ ID NO: 27751 - protein, 99 aa, Homo sapiens
TVSGGSISSGDYYWSWIRQPPGKGLEWIGYIYNSGSTYDNPSLKSRVTISVDTSKNHFSLKLSSVTAADTAVYYCARGGWGRLGYFDYWGQGTLVTVSS

SEQ ID NO: 27752 - protein, 99 aa, Homo sapiens
TVSGGSISSGDYYWSWIRQPPGKGLEWIGYIYHSGSTYYNPSLKSRIAISVDTSKNQLSLKLSSVTATDTAVYYCARGGWGRLGYFDYWGPGTLVTVSS

SEQ ID NO: 27753 - protein, 99 aa, Homo sapiens
TVSGDSIIGGDYYWSWIRQPPGEGLEWIGYIYNSGTTYYNPSLKSRLTISLDTSKNQFSLKLSSVTAADTAVYYCARGGWGRLGYFDYWGQGSLVTVSS

SEQ ID NO: 27754 - protein, 99 aa, Homo sapiens
TVSGDSIISGDYYWSWIRQTPGKGLEWIGYIYNSGTTYYNPSLRSRLTMSIDTSKNQFSLKLTSVTAADTAVYFCARGGWGRLGYFDYWGQGTLVSVSS

SEQ ID NO: 27755 - protein, 99 aa, Homo sapiens; identical to SEQ ID NO: 27752

SEQ ID NO: 27756 - protein, 99 aa, Homo sapiens; identical to SEQ ID NO: 27749

SEQ ID NO: 27757 - protein, 99 aa, Homo sapiens
TVSGGSTSSGDYYWSWIRQPPGKGLEWIGYIYYSGSTYYNPSLKSRLTISVDTSKNQFSLKLSSVTAADTAVYYCARGGWGRLGYFDYWGQGTLVTVSS

SEQ ID NO: 27758 - protein, 99 aa, Homo sapiens
TVSGGSISDGDFYWSWIRQPPGEGLEWIGYIYNSGSTYYNPSLRSRLTISIDTSKNQFSLKLSSVIAADTAVYYCARGGWGRLGYFDYWGQGNLVTVSS

SEQ ID NO: 27759 - protein, 99 aa, Homo sapiens
SVSDDSITDGDYYWSWIRQPPGEGLEWIGYIYNSGTTYYNPSLKSRLTISLDTSKNHFSLRLSSVTAADTAVYYCARGGWGRLGYFDYWGQGTLVTVSS

SEQ ID NO: 27760 - protein, 99 aa, Homo sapiens
TVSGGSISSGDYYWSWIRQPPGEGLEWIGYIYNSGSTYYNPSLKSRLTISVDTSKNQFSLKLSSVTAADTAVYYCARGGWGRLGYFDYWGQGTLVTVSS

SEQ ID NO: 27761 - protein, 99 aa, Homo sapiens; identical to SEQ ID NO: 27754

SEQ ID NO: 27762 - protein, 99 aa, Homo sapiens
ATSGFNFNIYWMSWVRQAPGKGLEWVANIKEDGSDKNYVDSVKGRFTISRDNTKNSVYLQMSNLRAEDTAVYYCAKVGEAQQWRFFHHWGQGILVTVSS

SEQ ID NO: 27763 - protein, 98 aa, Homo sapiens
TSGFTFNIYWMSWVRQAPGKGLEWVANIKEDGSAKNYVDFVKGRFTISRDNAKNSVYLQMNNLRAEDTAVYYCAKVGEAQQWRFFHHWGQGILVTVSS

SEQ ID NO: 27764 - protein, 99 aa, Homo sapiens
ATSGFKFNIYWMSWVRQAPGKGLEWVANIKEDGSEKNYVDFVKGRFTISRDNAKNSVYLQMNNLRAEDTAVYYCAKVGEAQQWRFFHHWGQGIVVTVSS

SEQ ID NO: 27765 - protein, 99 aa, Homo sapiens
AASGFTFNIYWMSWVRQAPGKGLEWVANIKEDGSAKNYVDFVKGRFTISRDNVKNSVYLQMNNLRAEDTAVYYCAKVGEAQQWRFFHHWGQGILVTVSS

SEQ ID NO: 27766 - protein, 99 aa, Homo sapiens; identical to SEQ ID NO: 27762

SEQ ID NO: 27767 - protein, 108 aa, Homo sapiens
AASGFIFSDYWMNWVRQAPGKGLEWVATIKPDGSEKYYVDSVKGRFTISRDNAKNSLYVQMNSLRAEDTAVYYCARVSLSPDCGGSSCSSRYRWFDPWGQGTLVTVSS

SEQ ID NO: 27768 - protein, 107 aa, Homo sapiens
AASGFIFSDYWMNWVRQAPGKGLEWVATIKPDGSEKYYVDSVKGRFTISRDNAKNSLYVQMNSLRAEDTAVYYCARVSLSPDCGGSSCSSRYRWFDPWGQGTLSPSP

SEQ ID NO: 27769 - protein, 108 aa, Homo sapiens
AASGFIFSDYWMNWVRQAPGKGLEWVATIKPDGSEKYYVDSVKGRFTISRDNTKNSLYVQMNSLRADDTAIYYCARVSLSPDCGGSSCSSRYRWFDPLGQGTLVTVSS

SEQ ID NO: 27770 - protein, 98 aa, Homo sapiens
AASGFTFAEYSMNWVRQAPGKGLEWVSFISDTTRNIFYADSVRGRFTISRDNAKSSLYLQMDGLRDEDTAVYYCARSLPIFGVVFEYWGQGTLVTVSS

SEQ ID NO: 27771 - protein, 98 aa, Homo sapiens
EASGFTFATYSMNWVRQAPGKGLEWVSFISDTTRNIFYADSVRGRFTISRDNAKNSLYLQMDGLRDEDTAVYYCARSLPIFGVVFEYWGQGALVTVAS

SEQ ID NO: 27772 - protein, 98 aa, Homo sapiens
AASGFTFAEFSMNWVRQSPGKGLEWVSFISDTTRNIMYSDSVRGRFTVSRDNAKSSLYLQMDGLRDEDTAVYYCARSLPIFGVVFEYWGQGILVTVSS

SEQ ID NO: 27773 - protein, 98 aa, Homo sapiens
AASGFTFARYSMNWVRQAPGKGLEWVSFISDTTRTILYADSVRGRFTISRDNAKSSLYLQMDGLRDEDTAVYYCARSLPIFGVVFEYWGQGTLVTVSS

SEQ ID NO: 27774 - protein, 98 aa, Homo sapiens
TTSGFTFGDYGMNWFRQAPGKGLEWVSFIRSKRNGGTTEYVASVKGRFTILRDDSKSIAYLQMNSLKFEDTAVYYCSREMWEAGFDYWGQGALVTVSS

SEQ ID NO: 27775 - protein, 97 aa, Homo sapiens
TSGFTFGDYGMNWFRQAPGKGLEWLSFIRSKRKGGTTEYVPSVKGRFTILRDDSKSIAYLQMNSLKFEDTAVYYCSREMWEAGFDYWGQGALVTVSS

SEQ ID NO: 27776 - protein, 98 aa, Homo sapiens; identical to SEQ ID NO: 27774

SEQ ID NO: 27777 - protein, 98 aa, Homo sapiens
ITSGFMFGDYGMNWFRQAPGKGLEWVSFIRRKSRGETTEYAPSVKGRFTISRDDSKSIAYLQMNSLKFEDTAVYYCSREMWEAGFDYWGQGALVTVSS

SEQ ID NO: 27778 - protein, 97 aa, Homo sapiens
SGNSLGDSMMHWVRQRAGKSPEWIGGFNPVDRERIYAQMFQGRVTFTVDASADTGHMELRGLRRDDSAIYYCATGPIDLWTAYFPFWGQGTPVTVSS

SEQ ID NO: 27779 - protein, 97 aa, Homo sapiens
SGDSLGDSMMHWVRQRAGKSPEWIGGFNPVDRERIYAQMFQGRVTFTVDASADTGHMELRGLRRDDSAIYYCATGPIDLWTAYFPFWGQGTPVTVSS

SEQ ID NO: 27780 - protein, 97 aa, Homo sapiens
SGDSLGDSMMHWVRQRRGKGLEWIGGFNPVDRERIYAQMFQGRVTFTVDASADTGHMELRGLRRDDSGIYYCATGPIDLWTAYFPFWGQGTLVTVSS

SEQ ID NO: 27781 - protein, 97 aa, Homo sapiens
SGNSLGDSMMHWVRQRPGKSPEWIGGFNPVDRERIYAQMFQGRVTFTVDASADTGHMELRGLRRDDSAIYYCATGPIDLWTAYFPFWGQGTPVTVSS

SEQ ID NO: 27782 - protein, 100 aa, Homo sapiens
VSGDSVSNTGYHWGWIRQPPGKGLEWIGSIYYNGDTYYNPSLKSRVTISIDSSKNQFSLKLSSVTATDTALYYCATHHFWFQQKHNWFDPWGQGALVTVS

SEQ ID NO: 27783 - protein, 100 aa, Homo sapiens
VSGDSVSNTGYHWGWIRQPPGKGLEWIGSIYYNGDTYYNPPLKSRVTISIDSSKNQFSLKLSSVTATDTALYYCATHHFWFQQKHNWFDPWGQGALVTVS

SEQ ID NO: 27784 - protein, 100 aa, Homo sapiens; identical to SEQ ID NO: 27782

SEQ ID NO: 27785 - protein, 103 aa, Homo sapiens
AASGFTFSSYAMSWVRQAPGKGLEWVSAISGSGGSTYDADSLKGRFTISRDNSKNTLYLQMNSLRAEDTALYYCAKDLSNIVVVPALGDLDYWGQGTLVTVSS

SEQ ID NO: 27786 - protein, 103 aa, Homo sapiens; identical to SEQ ID NO: 27785

SEQ ID NO: 27787 - protein, 103 aa, Homo sapiens
AASGFTFSSYAMSWVRQAPGKGLEWVSAISGSGGSTYDADSLKGRFTISRDNSKNTLYLQMNSLRAEDTDLYYCAKDLSNIVVVPALGDLDYWGQGTLVTVSS

SEQ ID NO: 27788 - protein, 103 aa, Homo sapiens
AASGFTFSSYAMSWVRQAPGKGLEWVSAISGSGDSTYDADSLKGRFTISRDNSKNTLYLQMNSLRAEDTALYYCAKDLSNIVVVPALGDLDYWGQGTLVTVSS

SEQ ID NO: 27789 - protein, 103 aa, Homo sapiens
AASGFTFSSYAMSWVRQAPGKGLEWVSAISGSGGSTYDADALKGRFTISRDNSKNTLYLQMNSLRAEDTALYYCAKDLSNIVVVPALGDLDYWGQGTLVTVSS

SEQ ID NO: 27790 - protein, 103 aa, Homo sapiens; identical to SEQ ID NO: 27785

SEQ ID NO: 27791 - protein, 96 aa, Homo sapiens
SGFTFNNFAMMWVRQAPGKGLEWVSGISSSGVGTYYADSVKGRFTVSRDNSNDTLFLRMSNLRVEDTAVYYCAKDPQWLVRDFDHWGQGTLVTVSS

SEQ ID NO: 27792 - protein, 98 aa, Homo sapiens
EASGFTFNKFAMMWVRQAPGKGLEWVSGISSSGVNTYYADSVKGRFTVSRDNSNDTLSLRMNSLRVEDTAVYYCAKDPQWLVRDFDHWGQGTLVTVSS

SEQ ID NO: 27793 - protein, 96 aa, Homo sapiens
SGFTFNNFAMMWVRQAPGKGLEWVSGISSSGVATYYADSVKGRFTVSRDNSNDTLFLRMSNLRVEDTAVYYCAKDPQWLVRDFDHWGQGTLVTVSS

SEQ ID NO: 27794 - protein, 98 aa, Homo sapiens
EASGFTFNRFAMMWVRQAPGKGLEWVAGISSSGVNTYYADSVKGRFTVSRDNSKDTLYLRMDSLRVEDTAVYYCAKDPQWLVRDFDHWGQGTPVTVSS

SEQ ID NO: 27795 - protein, 98 aa, Homo sapiens
EASGFNFRNYGMHWVRQSPGQGLEWVALISVDGKKKWYGDSVKGRFTISRDNSKNTLYLQMNSLTPEDTATYYCSKRGASGGHYFDAWGQGDLVTVSS

SEQ ID NO: 27796 - protein, 98 aa, Homo sapiens
EASGFNFRNYGMHWVRHSPGQGLEWVALIGVDGKKKWYGDSVKGRFTISRDNSKNTVYLQMNSLTPEDTATYYCSKRGASGGHYFDAWGQGDLVTVSS

SEQ ID NO: 27797 - protein, 98 aa, Homo sapiens
TVSGGSMKNYFWSWVRQTPGKGLEWIGYVSFSGSTSYNPSLRGRVTMSADTSKNQFSLSLTSVTAADTGLYLCSRNPPDVGLGYMDAWGKGTTVTVSS

SEQ ID NO: 27798 - protein, 98 aa, Homo sapiens
TVSGDSMKNYFWSWVRQTPGKGLEWIGYVSFSGSTSYNPSLRGRVTMSADTSKNQFSLSLTSVTAADTGLYLCSRNPPDVGLGYMDAWGKGTTVTISS

SEQ ID NO: 27799 - protein, 98 aa, Homo sapiens
TVSGGSMKNYFWSWVRQTPGKGLEWIGYVSFSGSTSYNPSLRGRVTMSADTSKNQFSLSLTSVTASDTGLYLCSRNPPDVGLGYMDAWGKGTTVTVSS

SEQ ID NO: 27800 - protein, 98 aa, Homo sapiens
TVSGGSMKNYFWSWVRQTPGKGLEWIGYVSFSGSTSYNPSFRGRVTMSPDTSKNQFSLSLTSVTAADAGLYLCSRNPPDVGLGYMDAWGKGTTVTVSS

SEQ ID NO: 27801 - protein, 98 aa, Homo sapiens
TVSGGSMKSYFWSWVRQTPGKGLEWIGYVSFSGSTSYNPSLRGRVTMSADTSKNQFSLSLTSVTAADTGLYLCSRNPPDVGLGYMDAWGKGTTVTVSS

SEQ ID NO: 27802 - protein, 101 aa, Homo sapiens
SGFNFNDFGMHWVRKVPGKGLQWVSGITWNSGNEAYAASVKGRFIVSRDNAKNSLFLQMNSLRPEDTALYYCVKPSRGSGFDDRLGSFHVWGHGTMVTVSS

SEQ ID NO: 27803 - protein, 101 aa, Homo sapiens
SGFKFGDFGMHWVRKVPGKGLQWVSGISWNSGNKGYAESVKGRFIVSRDNAKNSLFLQMNSLRPEDTALYYCVKPSRGSGFDDRLGSFHVWGHGTMVTVSS

SEQ ID NO: 27804 - protein, 101 aa, Homo sapiens
SGFKFDDFGMHWVRKVPGKGLQWVSGITWNSGNKGYAESVKGRFIVSRDNAKNSLFLQMNSLRPEDTALYYCVKPSRGSGFDDRLGSFHVWGHGTMVTVSS

SEQ ID NO: 27805 - protein, 101 aa, Homo sapiens
SGFKLGDFGMHWVRKVPGKGLQWVSGITWNSANKGYAASVKGRFTVSRDNAKNSLFLQMNSLRPEDTALYYCVKPSRGSGFDDRLGSFHVWGHGTMVTVSS

SEQ ID NO: 27806 - protein, 101 aa, Homo sapiens
SGFNFDDFAMHWVRKVPGKGLQWVSGITWNSANKGYAASVKGRFIVSRDNAKNSLFLQMNSLRPEDTALYYCVKPSRGSGFDDRLGSFHVWGHGTLVTVSS

SEQ ID NO: 27807 - protein, 101 aa, Homo sapiens
SGFNLGDFGMHWVRKVPGKGLQWVSGINWNSGSRGYAASVKGRFIVSRDNAKNSLFLQMNSLRPEDTALYYCVKPSRGSGFDDRLGSFHVWGHGTMVTVSS

SEQ ID NO: 27808 - protein, 101 aa, Homo sapiens
SGFNFDDFAMHWVRKVPGKGLQWVSGITWNSGKKGYAESVKGRFIVSRDNAKNSLFLQMNSLRPEDTALYYCVKPSRGSGFDDRLGSFHVWGHGTMVTVSS

SEQ ID NO: 27809 - protein, 91 aa, Homo sapiens
EASGFTFDDYSMHWVRQVPGKGLEWVSHISWDGSSLTYADSVKGRFTVSRDNSKNSLFLQMDGLTTEDTAFYYCAKGITNWGQGTLVTVSS

SEQ ID NO: 27810 - protein, 91 aa, Homo sapiens
EASGFTFDDYSMHWVRQVPGKGLEWVSHISWDGSSITYADSVKGRFTVSRDNSKNSLFLQMDGLTTEDTAFYYCAKGITNWGQGTLVTVSS

SEQ ID NO: 27811 - protein, 99 aa, Homo sapiens
SGDTDTNDDINWVRQASAQGLEWVGYMNPTTGKTGYAQKFQGRVTMTRDAPSRTVYMELTDLTSEDTAVYFCARGGYLGSFYIRPPLLWGQGTKVTVSS

SEQ ID NO: 27812 - protein, 99 aa, Homo sapiens
SGDTVTNDDINWVRQASAQGLEWVGYMNPTTGKTGYAQKFQGRVTMTRDAPSRTVYMEVTDLTSEDTAVYFCARGGYLGSFYIRPPLLWGQGTKVTVSS

SEQ ID NO: 27813 - protein, 99 aa, Homo sapiens
AVSGFTFSSYGMHWVRQAPGKGLKWVAFISFDGSNKYYADSVKGRFTISRDNSKNTLYLQMNSLRTEDTAVYNCARSAAAGGQYYFDYWGQGTLVTVSS

SEQ ID NO: 27814 - protein, 99 aa, Homo sapiens
AASGFTFSSHGMHWVRQAPGKGLEWVTFVSFDGSDRYYADFVKGRFTISRDNSKNTLYLQLNSLRPDDTAVYYCARSAAAGGQYYFDYWGQGTLVTVSS

SEQ ID NO: 27815 - protein, 99 aa, Homo sapiens
AASGFTFSSYGMHWVRQAPGKGLEWVTFISFDGNNRYYADFVKGRFTISRDNSKNTLYLQLNSLRAEDTAVYYCARSAAAGGQYYFDYWGQGTLVTVSS

SEQ ID NO: 27816 - protein, 99 aa, Homo sapiens
AVSGFTFSSYGMHWVRQAPGKGLEWVTFISFDGSDRYYADFVKGRFTISRDNSKNTLYLQLNSLRAEDTAVYYCARSAAAGGQYYFDYWGQGTLVTVSS

SEQ ID NO: 27817 - protein, 99 aa, Homo sapiens
AASGFTFSSHGMHWVRQAPGKGLEWVTFISFDGGDRYYADFVKGRFTISRDNSKTTLYLQLNSLRPEDTAVYYCARSAAAGGQYYFDYWGQGTLVTVSS

SEQ ID NO: 27818 - protein, 96 aa, Homo sapiens
TVSGASVTNAYWHWIRQPPGKGLEWIGRIDYTGTTFYNYSLKSRVTLSVKTSKNQFSLRLNSVTAADTAVYYCARALTATPYFDNWGQGTLVTVSS

SEQ ID NO: 27819 - protein, 96 aa, Homo sapiens
TVSGASIRNYFWSWIRQPPGKGLEWIGHIYNTGTTFYNPSLKSRVTLSVKTSKNQFSLRLNSVTAADTAVYYCARALTATPYFDNWGQGTLVTVSS

SEQ ID NO: 27820 - protein, 98 aa, Homo sapiens
TVSGESITSPPYFWSWIRHHPGKGLEWIGYISHSGSTHYNPSLRTRATLSLDTSKNQFSLRLTSVTAADTAVYHCARERHLGELRDVWGKGTTVTVSS

SEQ ID NO: 27821 - protein, 98 aa, Homo sapiens
TVSGESITSPPYYWSWIRHHPGKGLEWIGYISHSGSTHYNPSLRTRATLSLDTSKNQFSLRLTSVTAADTAVYHCARERHLGELRDVWGEGTTVTVSS

SEQ ID NO: 27822 - protein, 98 aa, Homo sapiens; identical to SEQ ID NO: 27820

SEQ ID NO: 27823 - protein, 98 aa, Homo sapiens
TVSGESITNPPYYWSWIRQHPGKDLEWIGYISHSGDPHYNPSLRTRVTLSLDTSKNQFSLRLTSVTAADTAVYYCARERHLGELRDVWGKGTTVTVSS

SEQ ID NO: 27824 - protein, 98 aa, Homo sapiens
TVSDESITSPPYFWSWIRHHPGKGLEWIGYISHSGSTHYNPSLRTRATLSLDTSKNQFSLRLTSVTAADTAVYHCARERHLGELRDVWGKGTTVTVSS

SEQ ID NO: 27825 - protein, 98 aa, Homo sapiens
TVSGESVAGPPYFWSWIRHHPGKGLEWIGYISHSGDTRYNPSLRTRATLSLDTSKNQFSLRLTSVTAADTAVYHCARERHLGELRDVWGKGTTVTVSS

SEQ ID NO: 27826 - protein, 98 aa, Homo sapiens
TVSGESVTSPPYFWSWIRHHPGKGLEWIGYISDSGSTRYNPSLRTRATLSLDTSKNQFSLRLTSVTAADTAVYHCARERHLGELRDVWGKGTTVTVSS

SEQ ID NO: 27827 - protein, 98 aa, Homo sapiens
ASGGTFSSYEITWIRQAPGQGLEWMGVIIPLYGPPTYAQKFQGRLTITAESTNTIYMELSSLRSEDTAVYYCASGYYDTRGYYSQDSWGRGTLVTVSS

SEQ ID NO: 27828 - protein, 98 aa, Homo sapiens
ASGGTFNNYEISWVRQAPGQGLEWMGWITPIFGPAKYAQKFQGRLTITAESTTTTYMELSSLSSEDTAVYYCASGYYDTRGYYSQDSWGQGTLVTVSS

SEQ ID NO: 27829 - protein, 95 aa, Homo sapiens
SGFTSTLHWFAWVRRMPGKGLEWMGSIYPGTSETYYGPSSQGQVTMSVDKSISIAYLQWNVLKPSDSAMYFCAMTKGLTGEIDLWGQGTLLTVSS

SEQ ID NO: 27830 - protein, 95 aa, Homo sapiens
SGFSSTIHWFAWVRRMPGKGLEWVGSIYPGTSETYYRPSSQGQVTMSVDKSINTAYLRWTFLKPSDSAMYFCAMTKGLTGEIDLWGQGTLLTVSS

SEQ ID NO: 27831 - protein, 95 aa, Homo sapiens
SGFTSTIHWFAWVRRMPGKGLEWMGSIYPGTSETYYRPSSQGQVTMSVDKSISTAYLQWNVLKPSDSAMYFCAMTKGLTGEIDLWGQGTLLTVSS

SEQ ID NO: 27832 - protein, 95 aa, Homo sapiens
SGFTSTIHWFAWVRRMPGKGLEWMGSIYPGTSETYYRPSSQGQVTMSVDKSISTAYLKWNVLKPSDSAMYFCAMTKGLTGEIDLWGQGTLLTVSS

SEQ ID NO: 27833 - protein, 95 aa, Homo sapiens; identical to SEQ ID NO: 27831

SEQ ID NO: 27834 - protein, 98 aa, Homo sapiens
TVSGGSTSSRSFFWGWIRQTPGKGLEWIGSICSDGRTYQNPSLNSRVSISLDTSKNQFSLRLNSVTAADTAVYYCARLVCGDCYSDNWGHGTLVTVSS

SEQ ID NO: 27835 - protein, 98 aa, Homo sapiens
TVSGGSTSSRSYFWGWIRQPPGKGLEWIGSICSDGRTYQNPSLNSRVSISVDTSNNQFSLRLSSVTAADTAVYYCARLVCGDCYSDNWGHGTLVTVSS

SEQ ID NO: 27836 - protein, 98 aa, Homo sapiens
TVSGGSTSSRSYFWGWIRQPPGKGLEWIGSICSDGRTYYNPSLNSRVSISVDTSNNQFSLRLSSVTAADTAVYYCARLVCGDCYSDNWGHGTLVTVSS

SEQ ID NO: 27837 - protein, 103 aa, Homo sapiens
ISGDSVSSSIVTWNWIRQSPSRGLELVGRAYYRSKWYIDYGASVKGRITITPDTSKNQLSLQLSSVTPEDTAVYYCTKYCSTAVCSMGALDVWGQGTMVTVSS

SEQ ID NO: 27838 - protein, 103 aa, Homo sapiens
ISGDSVSTSIVTWNWIRQSPSRGLEWVGRAYYRSKWYIDYGASVKGRITITPDTSKNQLSLQLRSVNPEDTAVYYCTKYCSTAVCSMGALDVWGQGTMVTVSS

SEQ ID NO: 27839 - protein, 103 aa, Homo sapiens
ISGDSVSSNIVTWNWIRQSPSRGLEWVGRAYYRSKWYIDYGASVKGRITITPDTSKNQLSLQLSSVTPEDTAVYYCTKYCSTAVCSMGALDVWGQGTMVTVSS

SEQ ID NO: 27840 - protein, 103 aa, Homo sapiens; identical to SEQ ID NO: 27839

SEQ ID NO: 27841 - protein, 103 aa, Homo sapiens
ISGDSVSSSIVTWNWIRQSPSRGLEWVGRAYYRSKWYIDYGASVKGRITITPDTSKNQLSLQLSSVTPEDTAVYYCTKYCSTAVCSMGALDVWGQGTMVTVSS

SEQ ID NO: 27842 - protein, 103 aa, Homo sapiens
ISGDSVSSSIVTWNWIRQSPSRGLEWVGRAYYRSKWYIDYGASVKGRITITPDTSKSQLSLQLSSVTPEDTAVYYCTKYCSTAVCSMGALDVWGQGTMVTVSS

SEQ ID NO: 27843 - protein, 103 aa, Homo sapiens
ISGDSVSSSIVTWNWIRQSPSRGLEWVGRAYYRSKWYIDYGASVKGRITITPDTSKNQLSLQLRSVSPEDTAVYYCTKYCSTAVCSMGALDVWGQGTMVTVSS

SEQ ID NO: 27844 - protein, 103 aa, Homo sapiens; identical to SEQ ID NO: 27841

SEQ ID NO: 27845 - protein, 103 aa, Homo sapiens; identical to SEQ ID NO: 27841

SEQ ID NO: 27846 - protein, 91 aa, Homo sapiens
SGIAVIDNHITWVRQAPGKGLEWVSVHYKGGYIHYADSVKGRFTISRDISKNTVYLQMNSLSTEDTATYFCARDLGWFDLWGHGTLVTVSS

SEQ ID NO: 27847 - protein, 91 aa, Homo sapiens; identical to SEQ ID NO: 27846

SEQ ID NO: 27848 - protein, 96 aa, Homo sapiens
TTSGFTFGDYAVIWVRQAPGKGLEWVGFIRSKTYGGTTEYAASVKGRFTISRDDSKSIAYLQMNSLKTEDTAVYYCTRQYQFLDYWGQGTLVTVSS

SEQ ID NO: 27849 - protein, 94 aa, Homo sapiens
SGFNFGDLAIIWVRQAPGKGLEWVGFIRSKTYGATTEYAASVQGRFTISRDDSKRIAYLQMNSLKTEDTAIYYCTRQYQFLDYWGRGTLVTVSS

SEQ ID NO: 27850 - protein, 96 aa, Homo sapiens
TTSGFTFGDYAVIWVRQAPGKGLEWVGFIRSKTYGATTEYAASVKGRFTISRDDSKSIAYLQMNSLKTEDTAVYYCTRQYQFLDYWGQGTLVTVSS

SEQ ID NO: 27851 - protein, 96 aa, Homo sapiens; identical to SEQ ID NO: 27850

SEQ ID NO: 27852 - protein, 96 aa, Homo sapiens
TTSGFNFGDLAVIWVRQAPGKGLEWVGFIRSKTYGGTTEYAASVKGRFTISRDDSKSIAYLQMNSLKTEDTAVYYCTRQYQFLDYWGQGTLVTVSS

SEQ ID NO: 27853 - protein, 97 aa, Homo sapiens
EASGYSFRSYWMSWVRQAPGKGLEWVANIQIGGTTRFYVDSVKGRFSASSDNGKNTLYLQLDSLRAEDTAVYYCARLGGRSNRYDYWGQGTQVTVSS

SEQ ID NO: 27854 - protein, 97 aa, Homo sapiens
EASGFNFGKYWMSWVRQSPGKGLEWVANIEVGGSKRFYMESVKGRFTASSDNAKNSLYLQLDSLRAEDTAVYYCARLGGRSNRYDYWGQGTLVTVSS

SEQ ID NO: 27855 - protein, 97 aa, Homo sapiens
EASGFTFGNYWMSWVRQSPGKGLEWVANIEVAGSKRFYMDSVKGRFTASSDNAKNSLFLQLDSLRAEDTAVYYCARLGGRSNRYDYWGQGTLVTVSS

SEQ ID NO: 27856 - protein, 97 aa, Homo sapiens
ETSGFTFSNHWMSWVRQSPGKGLEWVANINFDGSKKFHVDSVKGRFTASSDNAKSSVYLHLDSLRAEDTAVYYCARLGGRSNRYDYWGQGTLVTVSS

SEQ ID NO: 27857 - protein, 97 aa, Homo sapiens
EASGFTFSDYWMSWVRHSPGKGLEWVANISPHGSQKAYVDSVKGRFTASIDNARNSLSLQLDSLRAEDTAVYYCARLGGRSNRYDYWGQGILVTVSS

SEQ ID NO: 27858 - protein, 97 aa, Homo sapiens; identical to SEQ ID NO: 27855

SEQ ID NO: 27859 - protein, 100 aa, Homo sapiens
ETSGFIFTDRHMDWVRQTSEKGLEWVGRSRNEAHSYTTEYAASVKGRVSIYRDISRNSLYLQLNSLKTEDTAVYYCARVEGATGGNHDYWGQGTLVTVSS

SEQ ID NO: 27860 - protein, 100 aa, Homo sapiens
ATSGFTLSDRHMDWVRQASGKGLEWVGRSRNEAHSFSTEYAASVRGRVTISRDDSRNSLYLQLNSLKTEDTAVYYCARVEGATGGNHDYWGQGTLVTVSS

SEQ ID NO: 27861 - protein, 100 aa, Homo sapiens
AASGFTLSDRHMDWVRQASGKGLEWVGRSRNKANSYTTEYAASVKGRVTISRDDSRNSLYLQLNSLKTEDTAVYYCARVEGATGGNHDYWGQGTLVTVSS

SEQ ID NO: 27862 - protein, 100 aa, Homo sapiens; identical to SEQ ID NO: 27860

SEQ ID NO: 27863 - protein, 100 aa, Homo sapiens
AVSGFTLRDRHMDWVRQPSGKGLEWIARSRNEANGYTTEYAASVKGRVTISRDNSRDSLYLQLNSLKIEDTAVYYCARVEGATGGNHDYWGQGTLVTVSS

SEQ ID NO: 27864 - protein, 100 aa, Homo sapiens
AASGFTLSDRHMDWVRQASGKGLEWVGRSRNKANSYTTEYAASVKGRVTISRDDSTNSLYLQLNSLKTDDTAVYYCARVEGATGGNHDYWGQGTLVTVSS

SEQ ID NO: 27865 - protein, 100 aa, Homo sapiens
ATSGFTLSDRHMDWVRQASGKGLEWVGRSRNEAHSFTTEYAASVKGRVTISRDDSRNSLYLQLNSLKTEDTAVYYCARVEGATGGNHDYWGQGTLVTVSS

SEQ ID NO: 27866 - protein, 100 aa, Homo sapiens
ATSGFTLSDRHMDWVRQASGKGLEWVGRSRNEAHSFTTEYAASLKGRVTISRDDSRNSLYLQLNSLKTEDTAVYYCARVEGATGGNHDYWGQGTLVTVSS

SEQ ID NO: 27867 - protein, 100 aa, Homo sapiens; identical to SEQ ID NO: 27866

SEQ ID NO: 27868 - protein, 100 aa, Homo sapiens; identical to SEQ ID NO: 27860

SEQ ID NO: 27869 - protein, 100 aa, Homo sapiens; identical to SEQ ID NO: 27860

SEQ ID NO: 27870 - protein, 102 aa, Homo sapiens
AASGFTVSRTYMSWVRQAPGKGLEWISVIYRDGATYYADSVKGRFIISRDSSKNTLFLQMGSLTAEDTAIYYCVRGGGAYCGGDCLRTLDIWGQGTMVTVSS

SEQ ID NO: 27871 - protein, 102 aa, Homo sapiens
AASGFTVSRTYMSWVRQAPGKGLEWISVIYRDGAAYYADSVKGRFIISRDSSKNTLFLQMGSLTVEDTAIYYCVRGGGAYCGGDCLRTLDIWGQGTMVTVSS

SEQ ID NO: 27872 - protein, 102 aa, Homo sapiens
AASGLSVSTTYMSWVRQAPGKGLEWVSVMYRDSTKYYADSVKGRFTISRDNSKNTLFLQMDSLTAEDTAIYYCVRGGGAYCGGDCLRTLDIWGQGTMVTVSS

SEQ ID NO: 27873 - protein, 102 aa, Homo sapiens
AASGFTVSRTYMSWVRQAPGKGLEWISVIYRDGATYYADSVKGRFIISRDSSKNTLFLQMASLTAEDTAIYYCVRGGGAYCGGDCLRTLDIWGQGTMVTVSS

SEQ ID NO: 27874 - protein, 102 aa, Homo sapiens
AASGFTVSGTYMSWVRQAPGEGLEWISVIYRDGATYYADSVKGRFIISRDSFKNRLFLQMGSLTAEDTAIYYCVRGGGAYCGGDCLRTLDIWGQGTMVTVSS

SEQ ID NO: 27875 - protein, 102 aa, Homo sapiens
AASGFTVSRTYMSWVRQAPGKGLEWISVIYRNGATYYADSVKGRFIISRDSSKNTLFLQMGSLTAEDTAIYYCVRGGGAYCGGDCLRTLDIWGQGTMVTVSS

SEQ ID NO: 27876 - protein, 102 aa, Homo sapiens; identical to SEQ ID NO: 27870

SEQ ID NO: 27877 - protein, 102 aa, Homo sapiens
AASGFTVSRTYMSWVRQAPGKGLEWISVIYRDGATYYAESVKGRFIISRDSSKNTLFLQMGSLTAEDTAIYYCVRGGGAYCGGDCLRTLDIWGQGTMVTVSS

SEQ ID NO: 27878 - protein, 102 aa, Homo sapiens; identical to SEQ ID NO: 27877

SEQ ID NO: 27879 - protein, 102 aa, Homo sapiens
VASGFTVSKTYMSWVRQAPGKGPEWLSVIYRDGGAYYADSVKGRFIISRDTSKNTLFLQMVSLTAEDTAVYYCVRGGGAYCGGDCLRTLDIWGQGTMVTVSS

SEQ ID NO: 27880 - protein, 102 aa, Homo sapiens
AASGFTVSRTYMSWVRQAPGKGLEWISVIYRNGATYYANSVKGRFIISRDSSKNTLFLQMGSLTAEDTAIYYCVRGGGAYCGGDCLRTLDIWGQGTMVTVSS

SEQ ID NO: 27881 - protein, 102 aa, Homo sapiens
AASGFTVSRTYMSWVRQAPGKGLEWISVLYRDGATYYADSVKGRFIISRDSSKNTLFLQMGSLTAEDTAIYYCVRGGGAYCGGDCLRTLDIWGQGTMVTVSS

SEQ ID NO: 27882 - protein, 102 aa, Homo sapiens
AASGLGVSSTYMSWVRQAPGSGLEWVSVIYSDSSTYYADSVKGRFTISRDNSKNTLFLQMDSLTADDTAIYYCVRGGGAYCGGDCLRTLDIWGQGTRVTVSS

SEQ ID NO: 27883 - protein, 102 aa, Homo sapiens
AASGLTVSSTYMSWVRQAPGKGLEWVSVIYRDSTTHYADSVKGRITISRDNSKNTLFLQMDSLTAEDTAIYYCVRGGGAYCGGDCLRTLDIWGQGTMVTVSS

SEQ ID NO: 27884 - protein, 102 aa, Homo sapiens
AASGFTVSSTYMSWVRQAPGEGLEWISVLYRDGATYYADSVKGRFIISRDSFRNTVLLQMGSLTAEDTAIYYCVRGGGAYCGGDCLRTLDIWGRGTMVTVSS

SEQ ID NO: 27885 - protein, 102 aa, Homo sapiens
AASGLTVSSTYMSWVRQAPGKGLEWVSVIYRDSTTYYADSVKGRFTISRDNSKNTLFLQMDSLTAEDTAIYYCVRGGGAYCGGDCLRTLDIWGQGTMVTVSS

SEQ ID NO: 27886 - protein, 102 aa, Homo sapiens; identical to SEQ ID NO: 27882

SEQ ID NO: 27887 - protein, 102 aa, Homo sapiens
AVSGFTVSGTYMSWVRQAPGQGLEWISVLYRNGATYYADSVKGRFIISRDSSKNTLFLQMGSLTDEDTAIYYCVRGGGAYCGGDCLRTLDIWGQGTMVTVSS

SEQ ID NO: 27888 - protein, 102 aa, Homo sapiens
AASGFTVSRTYMSWVRQAPGKGLEWISVIYRDGATYYADSVKGRFIISRDSSRNTLFLQMGSLTAEDTAIYYCVRGGGAYCGGDCLRTLDIWGQGTMVTVSS

SEQ ID NO: 27889 - protein, 102 aa, Homo sapiens
AASELTVSTTYMSWVRQAPGSGLEWVSVIYRDGSTYYADSVKGRFTISRDDSKNTVSLQMDSMSADDTALYYCVRGGGAYCGGDCLRTLDIWGQGTRVTVSS

SEQ ID NO: 27890 - protein, 102 aa, Homo sapiens
AASGFTVSRTYMSWVRQAPGKGLEWISVIYRDGATYYADSVKGRFIISRDSSRDTLFLQMGSLTAEDTAIYYCVRGGGAYCGGDCLRTLDIWGQGTVVTVSS

SEQ ID NO: 27891 - protein, 98 aa, Homo sapiens
EASGFVFRAYWMHWVRQVPGKGLVWVCGISSDGSEVMSADSARDRFTISRDNARNTLYLQMNSLSVDDTALYYCVRGGPYYRSFGDFWGQGTPVTVSS

SEQ ID NO: 27892 - protein, 98 aa, Homo sapiens
EASGFVFRAYWMHWVRQVPGKGLVWVCGISSDGSEVMSADSARDRFTISRDNAKNTLYLQMNSLSVDDTALYYCVRGGPYYRSFGDFWGQGTPVTVSS

SEQ ID NO: 27893 - protein, 101 aa, Homo sapiens
TVSDVPISGRSWAWIRQPPGKAMEWIGYIDDSGDLDEKTLISYNPSLQSRVSFSVDMSRGQFSLRLTSVTRADTAVYFCARVPSRARVDVWGQGILVTVSS

SEQ ID NO: 27894 - protein, 101 aa, Homo sapiens
TVSDVPISGRSWAWIRQPPGKAMEWIGYIDDSGDLAEETLISYNPSLQSRVSFSVDMSRGQFSLRLTSVTRADTAVYFCARVPSRARVDVWGQGILVTVSS

SEQ ID NO: 27895 - protein, 96 aa, Homo sapiens
AVSGFTFSNYWMTWVRQAPGKGLEWVANIKADGSEIYYVDSVRGRFIISRDNAKNSLYLQMNSLRVEDTAVYYCACYPVNAGMDYWGQGTLVIVSS

SEQ ID NO: 27896 - protein, 96 aa, Homo sapiens
AVSGFTFSNYWMTWVRQAPGKGLEWVANIKADGSEVHYVDSVRGRFIISRDNAKNSLYLQMNSLRVEDTAVYYCACYPVNAGMDYWGQGTLVYVSS

SEQ ID NO: 27897 - protein, 96 aa, Homo sapiens
AVSGFTFSNYWMTWVRQAPGKGLEWVANIKGDGSEVQYVDSVRGRFIISRDNAKNSLYLQMNSLRVEDTAVYYCACYPVNAGMDYWGQGTLVYVSS

SEQ ID NO: 27898 - protein, 96 aa, Homo sapiens
AVSGFTFSNYWMTWVRQAPGKGLEWVANIKKDGSEVHYVDSVRGRFIISRDNAKNSLYLQMNNLRVEDTAVYYCACYPVNAGMDYWGQGTLVYVSS

SEQ ID NO: 27899 - protein, 96 aa, Homo sapiens
AVSGFTFSNYWMTWVRQAPGKGLEWVANIKTDGSEVHYVDSVRGRFIISRDNAKNSLYLQMNSLRVEDTAVYYCACYPVNAGMDYWGQGTLVYVSS

SEQ ID NO: 27900 - protein, 96 aa, Homo sapiens
AVSGFTFSNYWMTWVRQAPGKGLEWVANIKTDGSEVHYVDSVRGRFIISRDNTKNSLYLQMNSLRVEDTAVYYCACYPVNAGMDYWGQGTLVYVSS

SEQ ID NO: 27901 - protein, 101 aa, Homo sapiens
AASGFPFNLYEMNWVRQAPGKGPEWVAYIRSGASTILYADSVKGRFTISRDDARNSVYLQMNSLRVEDTATYYCARVPLEGDFRGNCYAHWGQGTLVTVSS

SEQ ID NO: 27902 - protein, 101 aa, Homo sapiens
AASGFPFNAYEMNWVRQAPGKGPEWVAYIRSGASTILYADSVKGRFTISRDDAKNSLYLQMNSLRVEDTAIYYCARVPLEGDFRGNCYAHWGQGTLVTVSS

SEQ ID NO: 27903 - protein, 101 aa, Homo sapiens
AASGFPFSLYEMNWVRQAPGKGPEWVAYIRSGAATILYADSVKGRFTIFRDDARNSVYLQMNSLRVEDTATYYCARVPLEGDFRGNCYAHWGQGALVTVSS

SEQ ID NO: 27904 - protein, 101 aa, Homo sapiens
AASGFPFNLYEMNWVRQAPGKGPEWVAYIRSGASTILYADSVKGRFTISRDDAKNSVYLQMNSLRVEDTATYYCARVPLEGDFRGNCYAHWGQGTLVTVSS

SEQ ID NO: 27905 - protein, 115 aa, Homo sapiens
TETLTLTCTVSGYSLDSATMGVSWIRQPPGKALEWLAHVFSNDEKSYNTSLKRRLTISKDTSKSQVVLTMTNMDPVDTATYYCARIRGDQYDILTGYSPYYFDSWGQGALVTVSS

SEQ ID NO: 27906 - protein, 115 aa, Homo sapiens
TETLTLTCTVSGYSLDSATMGVSWIRQPPGKALEWLAHVFSNDEKSYNASLKRRLTISKDTSKSQVVLTMTHMDPVDTATYYCARIRGDQYDILTGYSPYYFDSWGQGALITVSS

SEQ ID NO: 27907 - protein, 96 aa, Homo sapiens
AASGFTFRTYAMNWVRQAPGKGLEWVSLISGGYGRSDTYYADSVKGRFTISRDNSKNILFLQMNSLRAEDTALYFCARDTTSLDYWGQGTLVTVSS

SEQ ID NO: 27908 - protein, 96 aa, Homo sapiens
AASGFTFRTYAMNWVRQAPGKGLEWVSLISGGYGRSSTYYADSVKGRFTISRDNSKNTLYLQMNSLRAEDTAVYFCARDTTSLDYWGPGTLVTVSS

SEQ ID NO: 27909 - protein, 96 aa, Homo sapiens
AASGFTFRTYAMNWVRQAPGKGLEWVSLISGGYGRSDTYYADSVKGRFTISRDNSKNTLYLQMNSLRAEDTAVYFCARDTTSLDYWGQGTLVTVSS

SEQ ID NO: 27910 - protein, 96 aa, Homo sapiens; identical to SEQ ID NO: 27909

SEQ ID NO: 27911 - protein, 96 aa, Homo sapiens; identical to SEQ ID NO: 27909

SEQ ID NO: 27912 - protein, 96 aa, Homo sapiens; identical to SEQ ID NO: 27909

SEQ ID NO: 27913 - protein, 95 aa, Homo sapiens
AASGFTFRTYAMNWVRQAPGKGLEWVSLISGGFGWSSTHYADSVKGRFTISRDNSKNTVYLEMNSVRAEDTALYFCARDTTSLDYWGLGTLVTVS

SEQ ID NO: 27914 - protein, 98 aa, Homo sapiens
AASGFTLSSHWMSWVRQAPGKGPEWVTYIKQDGSEKYYLESVKGRFTISRDNTKNSLYLQMNSLRVEDTAAYFCVRLNGGHGGDFDFWGQGTMVTVSS

SEQ ID NO: 27915 - protein, 93 aa, Homo sapiens
AASGFTFGSHWMSWVRQAPGKGPQWVTYIKQDGSEKYYLESVKGRFTISRDNTKNSLYLQMNSLRVEDTAAYFCVRLNGGHGGDFDFWGQGTM

SEQ ID NO: 27916 - protein, 98 aa, Homo sapiens
AASGFRFHIYMMNWIRQAPGKGLEWVSSINGNGAGAKYADSVKGRFTISRDNTENTLYLQMNSLRVEDTAIYYCVKDWGRDTGTRGYWGQGTLVTVSS

SEQ ID NO: 27917 - protein, 98 aa, Homo sapiens; identical to SEQ ID NO: 27916

SEQ ID NO: 27918 - protein, 98 aa, Homo sapiens
AASGFRFSVYMMNWIRQAPGKGLEWVSAIHGHGDVTKYADSVKGRFTISRDNTENTLSLQMNSLRVEDTAIYYCVKDWGRDTGTRGYWGQGTLVTVSS

SEQ ID NO: 27919 - protein, 97 aa, Homo sapiens
AASGFTFSDYYMSWIRQAPGKGLEWVSHISTRSSYTKYADSVKGRFTISRDNVQNSLFLQMNSLRAEDTAVYYCARDRHSSIGFDPWGQGTLVTVSS

SEQ ID NO: 27920 - protein, 97 aa, Homo sapiens; identical to SEQ ID NO: 27919

SEQ ID NO: 27921 - protein, 97 aa, Homo sapiens
AASGFTFSDYYMSWIRQAPGKGLEWVSHISTRSSYIKYADFVKGRFTISRDNVQNSLFLQMNSLRVDDTAVYYCARDRHSSIGFDPWGQGTLVTVSS

SEQ ID NO: 27922 - protein, 96 aa, Homo sapiens
ASGFNFPSYGFHWVRQAPGKGLEWVAMMWYNVRDSYYRDSVKGRFTISRDDSKKILFLEMNGLREDDTALYYCARAGPSGGVFDIWGQGTMVTVSS

SEQ ID NO: 27923 - protein, 96 aa, Homo sapiens
ASGFNFQSYGMHWVRQAPGKGLEWVAMMWYNVRDSYYSDSVKGRFTISRDDSKKTLFLQMNGLRNDDTALYYCARAGPSGGVFDIWGQGTMVTVSS

SEQ ID NO: 27924 - protein, 97 aa, Homo sapiens
AASGFKFSDSAMHWVRQASGKGLEWLGRIRSKSNNHETGYAASVKGRFTISRDDSQNTMYLQMDGLKTEDTALYYCTRPGQTGGDIWGQGTLVTVSS

SEQ ID NO: 27925 - protein, 97 aa, Homo sapiens
AASGFKFSDSAMHWVRQASGKGLEWLGRIRSKSNNHATGYAASVKGRFTISRDDSENTMYLQMNGLKTEDTALYYCTRPGQTGGDIWGQGTQVTVSS

SEQ ID NO: 27926 - protein, 97 aa, Homo sapiens; identical to SEQ ID NO: 27925

SEQ ID NO: 27927 - protein, 99 aa, Homo sapiens
AGSGFTFSGYGMSWVRQAPGKGLEWVSAISGSGGSTYYADSVKGRFTISRDNSKNTLYLQMNSLRADDTAVYYCAKEVTPLIVVVPGHWGQGTLVTVSS

SEQ ID NO: 27928 - protein, 99 aa, Homo sapiens
AGSGFTFSGYGMSWVRQAPGKGLEWVSAISGSGGSTYYADSVKGRFTISRDNSKKTLYLQMNSLRADDTAVYYCAKEVTPLIVVVPGHWGQGTLVTVSS

SEQ ID NO: 27929 - protein, 99 aa, Homo sapiens
AGSGFTFSGYGMSWVRQAPGKGLEWVSAISGSGGSTYYADSVKGQFTISRDNSKNTLYLQMNSLRADDTAVYYCAKEVTPLIVVVPGHWGQGTLVTVSS

SEQ ID NO: 27930 - protein, 99 aa, Homo sapiens; identical to SEQ ID NO: 27927

SEQ ID NO: 27931 - protein, 99 aa, Homo sapiens; identical to SEQ ID NO: 27927

SEQ ID NO: 27932 - protein, 97 aa, Homo sapiens
AASGLTIGTYGMGWVRQAPGKGLEWVSTISASATDTYYADSVRGRFTISSDYSKNTLFLQMHSLRVEDAALYYCVTTFGEWSRFDYWGQGALVTVSS

SEQ ID NO: 27933 - protein, 97 aa, Homo sapiens
AASGFTIGTYGMGWVRQAPGKGLEWVSTISATGADTYYADSVRGRFTISSDYSKNTLFLQMHSLRVEDAALYYCVTTFGEWSRFDYWGRGALVTVSS

SEQ ID NO: 27934 - protein, 98 aa, Homo sapiens
AVSGFSVSNVDYKYMSWVRQAPGKGLEWVSVIYDGEQTYFADSVRGRFTISRDTSTNTLYLQMDNLRVEDTAMYYCVKEDRGTTIYNWGRGTLVTVSS

SEQ ID NO: 27935 - protein, 97 aa, Homo sapiens
AVSGFSVSNVDQKYMSWVRQAPGKGLEWVSVIYAGARTYYADSVRGRFTISRDSSTNTLYLQMDNLRVEDTAMYYCVKEDRGTTIYNWGRGTLVTVS

SEQ ID NO: 27936 - protein, 98 aa, Homo sapiens
AVSGFSVSNVDQKYMSWVRQAPGKGLEWVSVIYAGARTYYADSVRGRFTISRDSSTNTLYLQMDNLRVEDTAMYYCVKEDRGTTIYNWGRGTLVTVSS

SEQ ID NO: 27937 - protein, 98 aa, Homo sapiens
AVSGFSVSNVDQKYMSWVRQAPGKGLEWVSVIYYGDGTYYADSVRGRFTISRDSSTNTLYLQMDNLRVEDTAMYYCVKEDRGTTIYNWGRGTLVTVSS

SEQ ID NO: 27938 - protein, 88 aa, Homo sapiens
GAGVDIRDTYVSWVRQAPGKGLEGVSINYEGGETFYAESVKGRFTVSRDISKSTVYLHMNSLRAEDTAVYYCVNFGTWGQGTLVTVSS

SEQ ID NO: 27939 - protein, 89 aa, Homo sapiens
AGSGFAVSGTYVSWVRQAPGKGLEEVAISYETGHTFYADPVKGRFTLSRDSSKNTVYLQMNSLRAEDTAVYYCVNFGTWGQGTLVTVSS

SEQ ID NO: 27940 - protein, 88 aa, Homo sapiens
GAGVDIRDTYVSWVRQAPGKGLEGVSINYERGETFYAESVKGRFTVSRDTSKATVYLHMNSLRADDTAVYYCVNFGTWGQGTLVTVSS

SEQ ID NO: 27941 - protein, 99 aa, Homo sapiens
TVSGGSISGYFWGWFRQSPQKGLEWIGYVFDNGRPKDNPSFVSRSTISLDMSKSQFSLKLTSLTIADTAVYYCARLPREAGSFGWFDPWGQGILVTVSS

SEQ ID NO: 27942 - protein, 99 aa, Homo sapiens; identical to SEQ ID NO: 27941

SEQ ID NO: 27943 - protein, 99 aa, Homo sapiens
TVFGGSISGYFWGWFRQSPDKGLEWIGYVLEPGRTKDNPSFVSRATILLDMSKSQFSLKLTSLTVADTAVYYCARLPREAGSFGWFDPWGQGILVTVSS

SEQ ID NO: 27944 - protein, 99 aa, Homo sapiens
TVSGGSISGYFWGWFRQSPKKGLEWIAYVVETGYIKHNPSFESRASISLDMSKSQFSLKLTSLTVADTAVYYCARLPREAGSFGWFDPWGQGILVTVSS

SEQ ID NO: 27945 - protein, 95 aa, Homo sapiens
AASGFTFSSYNMHWVRQAPGKGLEWVAVIWFDGTNENYADSVKGRFTISRDNSKNTLYLQMNSLRAEDTAVYYCARDHKLLPYYWGQGTLVTVSS

SEQ ID NO: 27946 - protein, 95 aa, Homo sapiens
AASGFSFSSYNMHWVRQVPGKGLEWVAIIWFDGTNENYADSVKGRFTISRDNSKNTLYLQMNSLRAEDTAVYYCARDHKLLPYYWGQGTLVTVSS

SEQ ID NO: 27947 - protein, 101 aa, Homo sapiens
AASGFTFNNHAMIWVRQAPGKGLEWVSGINARGNSRYYADSVKGRFTISRDNSKNTLFLEMNSLRADDAAEYYCARRYCDDTRCYVHIDFWGQGTLVTVSS

SEQ ID NO: 27948 - protein, 101 aa, Homo sapiens
AASGFTFSNHAMIWVRQAPGKGLEWVSGISAPGNYRYYADSVKGRFTISRDNSKNTLFLEMNSLRADDAAEYYCARRYCDDTRCYVHIDFWGQGTLVTVSS

SEQ ID NO: 27949 - protein, 99 aa, Homo sapiens
SGYTFTTYGISWVRQAPGQGLEWVAWISTFNDNPNIAQKFQGRLTMTTDTSTSTAYMELRSLRSDDTAVYYCTRARYSSGWYSDGGDYWGQGTLVTVSS

SEQ ID NO: 27950 - protein, 99 aa, Homo sapiens
SGYTFTTYGISWVRQAPGQGLEWVAWISTFNDNPNIAQKFQGRLTMTTDTSTSTAYMELRSLRSDDTAVYYCTRARYSSGWYSDGGDYWGKGTLVTVSS

SEQ ID NO: 27951 - protein, 96 aa, Homo sapiens
VSGYTLSELSLHWVRRTPGKGLELLGGADPKNGEPIFAQMLQGRLTMTEDTSTETAYMELRSLTSEDTAIYYCAASPYDSSGYSYWGQGTLVSVSS

SEQ ID NO: 27952 - protein, 96 aa, Homo sapiens
VSGYTLSELSIHWVRQAPGKGLELLGGADPKNGEPISAQKVQGRVIMTEDTATDTAYMELSSLRSDDTAVYYCAASPYDSSGYSYWGQGTLVTVSS

SEQ ID NO: 27953 - protein, 96 aa, Homo sapiens
VSGYTLSELSIHWVRQAPGKGLELLGGADPKNGEPISAQKFQGRVTMTEDTATDTAYMELSSLRSDDTAVYYCAASPYDSSGYSYWGQGTLVTVSS

SEQ ID NO: 27954 - protein, 102 aa, Homo sapiens
AASGFIFSNYVMGWVRQAPGKGLEWVSLISGSGGNRFYVDSVKGRITISRDNSKNTLYLQMNSLRAEDTAVYFCAKGRYPGPESNQNTFDSWGRGTLVTVSS

SEQ ID NO: 27955 - protein, 102 aa, Homo sapiens
GAFGFSFSNYVMGWVRQAPGKGLEWVSLINGSGGKRFYVDSVKGRITISRDNSKNTLYLQMNSLRAEDTAIYFCAKGRYPGPESNQNTFDSWGRGTLVTVSS

SEQ ID NO: 27956 - protein, 102 aa, Homo sapiens
GASGFIFTNYVMGWVRQAPGKGLEWVSLISGSGRNKFYVDSVKGRITISRDNSKNTLYLQMNSLRAEDTAVYFCAKGRYPGPESNQNTFDSWGRGALVTVSS

SEQ ID NO: 27957 - protein, 94 aa, Homo sapiens
AASGFIFSSHEMSWVRQAPGKGLEWVATITNGGYTIHYADSVKGRFTISRDNAKDLLFLQMNDLRGADTGLYFCATLWSSWGYWGQGTLVTVSS

SEQ ID NO: 27958 - protein, 94 aa, Homo sapiens
AASGFIFSSQEMSWVRQAPGKGLEWVATITNGGYTIHYADSVRGRFTISRDNAKDQLYLQMNDLRGADTGLYYCATLWSSWGYWGQGTLVTVSS

SEQ ID NO: 27959 - protein, 96 aa, Homo sapiens
AASGFTFSSYAMSWVRQAPGKGLEWVSAISGSTGSTYYADSVKGRFTISRDNSKNTLYLQMNSLRAEDTAVYYCAKLGLPEAFDIWGQGTMVTVSS

SEQ ID NO: 27960 - protein, 96 aa, Homo sapiens
APSGFTFGTYAMSWVRQAPGKGLDWVSAISGTTGSTYYADSVKGRFTISRDNSKNTLYLQMNSLRAEDTAVYYCAKLGLPEAFDIWGQGTMVTVSS

SEQ ID NO: 27961 - protein, 96 aa, Homo sapiens
GASGFTLSSYAMGWVRQAPGKGLEWVSLLSGTTGNTFYADSVKGRFTISGDNSKNTLCLQMNSLRADDTAVYYCAKLGLPEAFDIWGQGTMVTVSS

SEQ ID NO: 27962 - protein, 96 aa, Homo sapiens
AASGFTFSTSTLGWVRQAPGKGLEWVSLISGTTGTTYYADSVKGRFTFSRDNSKNTLYLQMNSLRAEDTALYYCAKLGLPEAFDIWGQGTLVTVSS

SEQ ID NO: 27963 - protein, 96 aa, Homo sapiens
AASGFTFSSYAMGWVRQAPGKGLEWVSLISGITGSTYYADSVKGRFTISRGNSKNTLYLQMNSLRADDTAVYYCAKLGLPEAFDIWGQGTMVTVSS

SEQ ID NO: 27964 - protein, 96 aa, Homo sapiens; identical to SEQ ID NO: 27960

SEQ ID NO: 27965 - protein, 96 aa, Homo sapiens
AASGFTFSSYAMTWIRQAPGKGLEWVSVISDSSGSTYYADSVKGRFTISRDNSKNTLYLQMNSLRAEDTAVYYCAKLGLPEAFDIWGQGTMVTVSS

SEQ ID NO: 27966 - protein, 96 aa, Homo sapiens
AASGFTFSSYAMTWVRQAPGKGLEWVSVISDSSGSTYYADSVKGRFTISRDNSKNTLYLQMNSLRAEDTAVYYCAKLGLPEAFDIWGQGTMVTVSS

SEQ ID NO: 27967 - protein, 95 aa, Homo sapiens
GFIFSHFSMHWVRQAPGSGLEWVASISSSSVDIGYGASVRGRFTVSRDDRTNSLFLHLTGLRDDDTAVYYCARGITSLPPHADYWGPGSQVTVSS

SEQ ID NO: 27968 - protein, 98 aa, Homo sapiens
ETSGFIFSHFSMHWVRQAPGSGLEWVASISSSSVDIGYGASVRGRFTVSRDDRTNSLFLHLTGLRDDDTAVYYCARGITSLPPHADYWGPGSQVTVSS

SEQ ID NO: 27969 - protein, 98 aa, Homo sapiens; identical to SEQ ID NO: 27968

SEQ ID NO: 27970 - protein, 98 aa, Homo sapiens
ETSGFIFSHFSMHWVRQAPGSGLEWVASISSSSVDIGYGASVRGRFTVSRDDRTNSLFLHLADLRDDDTAVYYCARGITSLPPHADYWGPGSQVTVSS

SEQ ID NO: 27971 - protein, 98 aa, Homo sapiens; identical to SEQ ID NO: 27968

SEQ ID NO: 27972 - protein, 105 aa, Homo sapiens
VSGGSITTSSYYWGWIRQPPGKGLEWIGSIYYSGSTYYNPSLKSRVTISVDTSKNQFSLRLRSVTAADTAVYYCARHPYCSSTSCYPYYYYMDVWGNGTTVTVSS

SEQ ID NO: 27973 - protein, 106 aa, Homo sapiens
TVSGGSISTSSYYWGWIRQSPGKGLEWIGSIYYSGSSYYNPSLKSRVSISVHTSKDQFSLKVISVTAADTAVYYCARHPYCSSTSCYPYYYYMDVWGKGTTVTVSS

SEQ ID NO: 27974 - protein, 105 aa, Homo sapiens
VSGGSITTSSYYWGWIRQPPGKGLEWIGSIYYSGSTYYNPSLKSRVTISVDTSKNQFSLKLRSVTAADTAVYYCARHPYCSSTSCYPYYYYMDVWGNGTTVTVSS

SEQ ID NO: 27975 - protein, 106 aa, Homo sapiens
TVSGGSIMTSSYYWGWIRQPPGKALEWIGSVYYSGSTYYTPSLKSRVTISVDTSKNQFSLKLRSVTVADTAVYYCARHPYCSSTSCYPYYYYMDVWGKGTTVIVSS

SEQ ID NO: 27976 - protein, 105 aa, Homo sapiens; identical to SEQ ID NO: 27972

SEQ ID NO: 27977 - protein, 105 aa, Homo sapiens
VSGGSITTSSYYWGWIRQPPGQGLEWIGSIYYSGSTYYNPSLKSRVAISVDTSKNQFSLKLRSVTAADTAVYYCARHPYCSSTSCYPYYYYMDVWGKGTTVTVSS

SEQ ID NO: 27978 - protein, 106 aa, Homo sapiens; identical to SEQ ID NO: 27973

SEQ ID NO: 27979 - protein, 106 aa, Homo sapiens
TVSGGSISTSSYYWGWIRQSPGKGLEWIGSIYYSGSTYYNPSLKSRVSISVHTSKDQFSLKVISVTAADTAVYYCARHPYCSSTSCYPYYYYMDVWGKGTTVTVSS

SEQ ID NO: 27980 - protein, 106 aa, Homo sapiens
TVSGGSISTSSYYWGWIRQPPGKGLEWIGSIYYSGSTYYNPSLKSRVTISVDTSKNQFSLKLSSVTAADTAVYYCARHPYCSSTSCYPYYYYMDVWGKGTTVTVSS

SEQ ID NO: 27981 - protein, 106 aa, Homo sapiens
TVSGGSVSTSSYYWGWIRQPPGRGLEWIGSIYYSGSTYYSPSLKSRVTISVDTSRDQFSLKLRSVTAADTAVYYCARHPYCSSTSCYPYYYYMDVWGKGTTVTVSS

SEQ ID NO: 27982 - protein, 106 aa, Homo sapiens; identical to SEQ ID NO: 27979

SEQ ID NO: 27983 - protein, 101 aa, Homo sapiens
TVSGGSVRSSGYYLSWIRQPPGKGLEFIGHISYGGSTYYNPSLRSRVTISVDTSKTQLSLHLNSVTAADTAVYYCGMSDRSGSSFVEFDYWGQGTLVTVSS

SEQ ID NO: 27984 - protein, 101 aa, Homo sapiens; identical to SEQ ID NO: 27983

SEQ ID NO: 27985 - protein, 101 aa, Homo sapiens
TVSGGSVRSSGYYLSWIRQPPGKGLEFIGHISYGGSTYYNPSVRSRVTISVDTSKTQLSLHLNSVTAADTAVYYCGMSDRSGSSFVEFDYWGQGTLVTVSS

SEQ ID NO: 27986 - protein, 101 aa, Homo sapiens; identical to SEQ ID NO: 27983

SEQ ID NO: 27987 - protein, 101 aa, Homo sapiens
TVSGGSVRSSGYYLSWIRQPPGKGLEFIGHISFGGSTYYSPSLRSRVTMSVDTSKTQLSLHLNSVTAADTAVYYCGMSDRSGSSFVEFDYWGQGTLVTVSS

SEQ ID NO: 27988 - protein, 101 aa, Homo sapiens; identical to SEQ ID NO: 27983

SEQ ID NO: 27989 - protein, 92 aa, Homo sapiens
TVSGDSMRTSYWSWIRQPPGKGLEWIGYIYYSGTTNYNPSLNNRVTISVDTSKNQFSLKLSSVTSADTAMYFCAREGPDGYWGQGTLVTVSS

SEQ ID NO: 27990 - protein, 92 aa, Homo sapiens
TVSGVSLRSSYWSWIRQPPGKGLEWIGRMYYSGSTDYNPSLNGRVTISVDTSKNQFSLKLISVTAADTAVYYCAREGPDGYWGQGTLVTVSS

SEQ ID NO: 27991 - protein, 92 aa, Homo sapiens
TVSGDSLRSSYWSWIRQPPGKGLEWIGHIYYSGSTDYNPSLNGRVTISVDTSKNQFSLKLISVTAADTAVYYCAREGPDGYWGQGTLVTVSS

SEQ ID NO: 27992 - protein, 92 aa, Homo sapiens
TVSGDSLRSSYWSWIRQPPGKGLEWIGYIYYSGSTDYNPSLSSRVTISVDTSKNQFSLKLRSVTAADTAVYYCAREGPDGYWGQGTLVTVSS

SEQ ID NO: 27993 - protein, 92 aa, Homo sapiens; identical to SEQ ID NO: 27990

SEQ ID NO: 27994 - protein, 92 aa, Homo sapiens; identical to SEQ ID NO: 27990

SEQ ID NO: 27995 - protein, 92 aa, Homo sapiens; identical to SEQ ID NO: 27992

SEQ ID NO: 27996 - protein, 92 aa, Homo sapiens
TVSGDSLRSSYWSWIRQPPGKGLEWIGYIYYSGTTDYNPSLNSRVTISIETSKNQFSLKLISVTAADTAVYYCAREGPDGYWGQGTLVTVSS

SEQ ID NO: 27997 - protein, 92 aa, Homo sapiens
TVSGVSLGSSYWSWIRQPPGKGLEWIGRMYYSGSTDYNPSLNGRVTISVDTSKNQFSLKLISVTAADTAVYYCAREGPDGYWGQGTLVTVSS

SEQ ID NO: 27998 - protein, 92 aa, Homo sapiens
TVSGDSLRTSYWSWIRQSPGKGLEWIGYIYYTGTTDYNPSLSSRVSISIDTSKNQFSLKLRSVTAADTAVYYCAREGPDGYWGQGTLVTVSS

SEQ ID NO: 27999 - protein, 97 aa, Homo sapiens
AASGFTFSSYWMHWVRQAPGKGLVWVSRINSDGSSTIYADSVKGRFTISRDNAKNTLYLQMNSLRAEDTAVYYCARTYSVVSPFDYWGQGTLVTVSS

SEQ ID NO: 28000 - protein, 97 aa, Homo sapiens
AASGFTFSNYWMHWVRQAPGKGLVWVSRIDSDGSGTIYADSVKGRFTVSRDNAKNTLYLQMNSLRAEDTAVYYCARTYSVVSPFDYWGQGTLVTVSS

SEQ ID NO: 28001 - protein, 104 aa, Homo sapiens
SVSGGPITGYYWGWVRQAPGKGLEWIGYVYYSGTTKYNPSLRGRVSMSVGPSATQFSLRLRSMTAADTAVYYCVRLDLGNYDGSGTRFRQFAYWGQGAPVTVSS

SEQ ID NO: 28002 - protein, 104 aa, Homo sapiens
SVSGGPITGYYWGWVRQAPGKGLEWIGYVYYSGTTKYNPSLRGRVSMSVGPSATQFSLRLRSLTAADTAVYYCVRLDLGNYDGSGTRFRQFAYWGQGAPVTVSS

SEQ ID NO: 28003 - protein, 104 aa, Homo sapiens
TVSGGPITGYYWGWVRQPPGKGLEWIGYVYYSGTTKYNPSLRGRVTVSVGPSATQFSLGLRSVTAADTAVYYCVRLDLGNYDGSGTRFRQFAYWGQGALVTVSS

SEQ ID NO: 28004 - protein, 103 aa, Homo sapiens
AASGFKFDEYVISWVRQTKGKGLEWVSHISGDGRYTFYIDSVKGRFTISRDNTKKSLFLQMDGLKTEDTAVYFCAKGPMWFGGTSRPGWYLDVWGKGSPVNVS

SEQ ID NO: 28005 - protein, 103 aa, Homo sapiens
AASGFTFDEHVITWVRQIKGKGLEWVSHISGDGRYTFYIDSVKGRFTISRDNTRNSLFLQMNSLKPEDSAVYYCAKGPMWFGGTSRPGWYLDVWGKGSPVTVS

SEQ ID NO: 28006 - protein, 104 aa, Homo sapiens
TVSGGSISSSNYYWGWIRQPPGKGLEWIGSIYYSGSTYYNPSLKSRVTISVDTSKNQFSLKLSSVTAADTAVYYCARHWSFGDVDWFKGWFDPWGQGTLVTVSS

SEQ ID NO: 28007 - protein, 104 aa, Homo sapiens
TVSGGSISSSNYYWGWIRQPPGKGLEWIGSIYYSGSTYYNPSLKSRVSISVDTSKKQFSLKLSSVTAADAAIYYCARHWSFGDVDWFKGWFDPWGQGTLVTVSS

SEQ ID NO: 28008 - protein, 97 aa, Homo sapiens
AVSGGSITSNWWNWVRQPPGKGLEWIGEILHTGSANYNPSLMSRVTISVDTSKNLLSLKLSSVTAADTAVYYCARIGYSGFGCSDYWGQGTLVTVSS

SEQ ID NO: 28009 - protein, 97 aa, Homo sapiens; identical to SEQ ID NO: 28008

SEQ ID NO: 28010 - protein, 97 aa, Homo sapiens
AVSGGSITRNWWNWVRQSPGKGLEWIGEILHSGSPNYNPSLMSRVTISVDTSKNLLSLKMISVTAADTAVYYCARIGYSGFGCSDYWGQGTLVTVSS

SEQ ID NO: 28011 - protein, 97 aa, Homo sapiens
AVSGGSITRNWWNWVRQSPGKGLEWIGEILHSGSANYNPSLMSRVTISVDTSKNLLSLKMNSVTAADTAVYYCARIGYSGFGCSDYWGQGTLVTVSS

SEQ ID NO: 28012 - protein, 96 aa, Homo sapiens
AVSGGSITSNWWNWVRQPPGKGLEWIGEILHTGSANYNPSLMSRVTISVDKSKNQLSLKLSSVTAADTAVYYCARIGYSGFGCSDYWGQGTLVTVS

SEQ ID NO: 28013 - protein, 102 aa, Homo sapiens
ASGFTFSDYWMTWVRQAPGKGLEWVANIRGDGSEDNYVDSVKGRFTISRDNAKKSVYLQMNSLRAGDTGMYYCARVDCGSIGCQGRDGFDPWGQGIQVTVSS

SEQ ID NO: 28014 - protein, 102 aa, Homo sapiens
ASGFTFSNYWMTWVRQAPGKGLEWVANIRGDGSEEKYVDSVKGRFTISRDNAKNSVYLQMNSLRAGDTGMYYCARVDCGSIGCQGRDGFDPWGQGTLVTVSS

SEQ ID NO: 28015 - protein, 102 aa, Homo sapiens
ASGFTFSNYWMTWVRQAPGKGLEWVANIRGDGSEEKYVDSVKGRFTISRDNAKNSVYLQMNSLRAGDTGMYFCARVDCGSIGCQGRDGFDPWGQGTLVTVSS

SEQ ID NO: 28016 - protein, 102 aa, Homo sapiens
ASGFTFSNYWMTWVRQAPGKGLEWVANIRGDGSEEKYVDSVKGRFTISRDNAKNSVYLQMNSLRADDTGMYYCARVDCGSIGCQGRDGFDPWGQGTLVTVSS

SEQ ID NO: 28017 - protein, 102 aa, Homo sapiens
ASGFTFSSYWMTWVRQAPGKGLEWVASIRGDGSEQRFVDSVKGRFTISRDNAMKQVYLQMNNLRAGDTGMYYCARVDCGSIGCQGRDGFDPWGQGTLVTVSS

SEQ ID NO: 28018 - protein, 102 aa, Homo sapiens
ASGFTFGNYWMTWVRQAPGKGLEWVANIRGDGSEEKYVDSVKGRFTISRDNAKNSVYLQMNSLRADDTGMYYCARVDCGSIGCQGRDGFDPWGQGTLVTVSS

SEQ ID NO: 28019 - protein, 102 aa, Homo sapiens
ASGFTFSSYWMTWVRQAPGKGLEWVASIRGDGSEQRFVDSVKGRFTISRDNAMKQVYLQMNNPRAGDTGMYYCARVDCGSIGCQGRDGFDPWGQGTLVTVSS

SEQ ID NO: 28020 - protein, 104 aa, Homo sapiens
ASGYTFTTYGISWVRQAPGQGLEWMGWIRVHNADVKLTQKFRGRVSMTTDTATSTAYMELTSLKSDDTAVYYCARGRPHFCSGTCYPDDAFSIWGQGTMVIVSS

SEQ ID NO: 28021 - protein, 104 aa, Homo sapiens
ASGYTFTTYGITWVRQAPGQGLQWMGWIRVHNADVKLTQKFRGRVSMTTDTATSTAYMELTSLKSDDTAVYYCARGRPHFCSGTCYPDDAFSIWGQGTMVIVSS

SEQ ID NO: 28022 - protein, 104 aa, Homo sapiens
ASGYIFTTYGISWVRQAPGQGLEWMGWIRVHNADVKLTQKFRGRVSMTTDTATSTANMELTSLKSDDTAVYYCARGRPHFCSGTCYPDDAFSIWGQGTMVIVSS

SEQ ID NO: 28023 - protein, 104 aa, Homo sapiens; identical to SEQ ID NO: 28020

SEQ ID NO: 28024 - protein, 96 aa, Homo sapiens
TVSGGSISSGSYYWNWIRQHPGKGPEYIGYISYTGSTYYNPSLKSRITISVDTSKNQFSLKLSSVTAADTAVYYCAGLTPYYFDYWGQGTLVTVSS

SEQ ID NO: 28025 - protein, 96 aa, Homo sapiens
TVSGGSISSGSYYWNWIRQHPGKGPEYIGYISYTGSTYYNPSLKSRITMSVDTSKNQFSLKLSSVTAADTAVYYCAGLTPYYFDYWGQGTLVTVSS

SEQ ID NO: 28026 - protein, 96 aa, Homo sapiens
TVSGGSISSGSYYWNWIRQHPGKGPEYIGYISYTGSTYYNPSPKSRITISVDTSKNQFSLKLSSVTAADTAVYYCAGLTPYYFDYWGQGTLVTVSS

SEQ ID NO: 28027 - protein, 99 aa, Homo sapiens
AASGFTFNIYWMSWVRQAPGKGLEWVASIKEDGSEKYYVDSVKGRFTISRDNAKNSLYLQMNSLRAEDTAVYYCARDGWRGSYIFFDYWGQGTLVTVSS

SEQ ID NO: 28028 - protein, 99 aa, Homo sapiens; identical to SEQ ID NO: 28027

SEQ ID NO: 28029 - protein, 100 aa, Homo sapiens
AVSGFTLRDRHMDWVRQPSGKGLEWIARSRNEANGYTTEYAASVKGRVTISRDDSRDSLYLQLNSLKIEDTAVYYCARVEGATGGNHDFWGQGTLVTVSS

SEQ ID NO: 28030 - protein, 100 aa, Homo sapiens
AVSGFTLRDRHMDWVRQPSGKGLEWIARSRNEANGYTTEYAASVKDRVTISRDDSRDSLYLQLNSLKIEDTAVYYCARVEGATGGNHDFWGQGTLVTVSS

SEQ ID NO: 28031 - protein, 100 aa, Homo sapiens
AASGFTLSDRHMDWVRQTSGKGLEWVGRSRNKANSYTTEYAASVKGRVTISRDDSRNSLYLQLNSLKTEDTAVYYCARVEGATGGNHDFWGQGTLVTVSS

SEQ ID NO: 28032 - protein, 96 aa, Homo sapiens
VSVYTLTELSIHWVRQAPGKGLERMGGSDPKNGEGIFAQNFQGRLILTEDTSTNTAYMELSSLRSDDTAIYYCAASPYDSSGYSLWGQGTLVTVSS

SEQ ID NO: 28033 - protein, 96 aa, Homo sapiens
VSVYTLSELSIHWVRQAPGKGLERMGGSDPKNGEGIFAQKFQGRLILTEDTSTDTVFMELSGLRSEDTAMYYCAASPYDSSGYSLWGQGTLVTVSS

SEQ ID NO: 28034 - protein, 96 aa, Homo sapiens
VSGYTLTELSLHWVRQAPGKGLELVGGRDPKNGETLDAQRFKDRVTLTEDTSTDTAYMELSSLRSEDTAVYYCAASPYDSSGYSLWGQGTLLTVSS

SEQ ID NO: 28035 - protein, 96 aa, Homo sapiens; identical to SEQ ID NO: 28034

SEQ ID NO: 28036 - protein, 96 aa, Homo sapiens
VSGYTLTELSLHWVRQAPGKGLELVGGRDPKTGETLDAQRFKDRVTLTEDTSTDTAYMELSSLRSEDTAVYYCAASPYDSSGYSLWGQGTLLTVSS

SEQ ID NO: 28037 - protein, 102 aa, Homo sapiens
TVTGGSVSSYYWSWVRQPPGKGLEWLGYIYYSGSTNYNPSLRSRLTISLDKSKNQFSLKMRSVTAADTAVYFCARRMVRENHGNYYYYMDSWGKGTTVIVSS

SEQ ID NO: 28038 - protein, 102 aa, Homo sapiens
TVTGGSVSSYYWSWVRQPPGKGLEWLGYIYYSGSTNYNPSLRSRLTMSLDKSKNQFSLNMRSVTAADTAVYFCARRMVRENHGNYYYYMDSWGKGTTVIVSS

SEQ ID NO: 28039 - protein, 96 aa, Homo sapiens
AASGFSFNTYDLNWVRQAPGKGLDWISYISSSGSTTHYADSVKGRFTVSRDNAKNSLFLQMNSLRADDTALYYCVTDVSTFGRVWWGQGTLVAVSS

SEQ ID NO: 28040 - protein, 96 aa, Homo sapiens
AASGFSFHTYDLNWVRQAPGKGLDWISYISSSGSTTHYADSVKGRFTVSRDNAKNSLFLQMNSLRADDTAVYYCVTDVSTFGRVWWGQGTLVAVSS

SEQ ID NO: 28041 - protein, 96 aa, Homo sapiens
AASGFSFHTYDLNWVRQAPGKGLEWISYISSSGSTTHYADSVKGRFTVSRDNAKNSLFLQMNSLRADDTALYYCVTDVSTFGRVWWGQGTLVAVSS

SEQ ID NO: 28042 - protein, 98 aa, Homo sapiens
AASGFIFSDYAMSWVRQAPGKGLEWVSAITGSGETTYYLDSVEGRFTIARDNSKDTLYLYMRSLRAEDTAMYYCTKRRSSAGSYLDYWGQGSLVTVSS

SEQ ID NO: 28043 - protein, 98 aa, Homo sapiens
VASGFAFGNYAMGWVRQAPGKGLEWVSAITAGGETTYYLDSVEGRFTIYRDNFRNTVYLLMNSLRAEDTATYFCTKRRSSAGSYLDYWGQGTLVTVSS

SEQ ID NO: 28044 - protein, 98 aa, Homo sapiens
AASGFTLTGHWLHWVRQAPGEGLVWLSQITPDGRTTIYADYVKGRFTVSRDDAKNTVFLQMNSLRVEDTAVYYCTRGCTTTTCPADLWGQGTTVIVSS

SEQ ID NO: 28045 - protein, 98 aa, Homo sapiens; identical to SEQ ID NO: 28044

SEQ ID NO: 28046 - protein, 98 aa, Homo sapiens
AASGFTLTGHWLHWVRQAAGEGLVWLSQITPDGRTIIYADYVKGRFTVSRDDAKNTVFLQMNSLRVEDTAVYYCTRGCTTTTCPADLWGQGTTVIVSS

SEQ ID NO: 28047 - protein, 100 aa, Homo sapiens
ASEYTFETYGFHWVRQAPGQSLEWMGWVNPVKSLTRFSQKFQGRITLGTDTSAGFVYMELNSLTSEDTAVYYCAAVKGIIAAPTYSFDHWGQGTLVTVSS

SEQ ID NO: 28048 - protein, 99 aa, Homo sapiens
SESTFQTYGFHWVRQAPGQSLEWMGWVNPVRSLTRFSQKFQDRITLGTDTSAGFVYLELSSLTSEDTAVYYCAAVKGIIAAPTYSFDHWGQGTLVTVSS

SEQ ID NO: 28049 - protein, 93 aa, Homo sapiens
ASGFPFSVYAMNWVRQAPGKGLEWISYISSTFEIHYADSVKGRFTVSRDSAKNTVYLQMNSLRDEDTAVYYCVRDHQWALDYWGQGTLVTVSS

SEQ ID NO: 28050 - protein, 94 aa, Homo sapiens
GASGFSFSTYAMNWVRQAPGKGLEWLSYISSTFEIHYGDSVKGRFTVSRDSARNSVYLQMNSLRDEDTAVYYCVRDHQWALDYWGQGTLVTVSS

SEQ ID NO: 28051 - protein, 95 aa, Homo sapiens
AASGFSLSSYNMNWVRQAPGKGLEWVSYITTSSETIYYADSVKGRFTISRDNGKNSLYLQMNSLRDEDTAVYYCVRDHQWALDYWGQGALVTVSS

SEQ ID NO: 28052 - protein, 98 aa, Homo sapiens
TVSGGSITNYYWSWIRQPPGKGLEWIGYIYYTGSTNYNPSLKSRVTMSVDTSKNQFSLKLKSVTAADTAVYHCARGGGWLQFSAFDIWGQGTMVTVSS

SEQ ID NO: 28053 - protein, 98 aa, Homo sapiens
TVSGGSITNYYWSWIRQPPGKGLEWIGYIYYTGSTNYNPSLKSRVTMSVDTSKNQFSLKLSSVTAADTAVYHCARGGGWLQFSAFDIWGQGTMVTVSS

SEQ ID NO: 28054 - protein, 98 aa, Homo sapiens; identical to SEQ ID NO: 28053

SEQ ID NO: 28055 - protein, 98 aa, Homo sapiens
TVSGGSITNYYWSWIRQPPGKGLKWIGYIYYTGSTNYNPSLKSRVTMSVDTSKNQFSLKLSSVTAADTAVYHCARGGGWLQFSAFDIWGQGTMVTVSS

SEQ ID NO: 28056 - protein, 98 aa, Homo sapiens; identical to SEQ ID NO: 28053

SEQ ID NO: 28057 - protein, 96 aa, Homo sapiens
VASGFTFGFYGMIWVRQAPGKGLERISSMDNHINGHNAYYADSVKGRFTISRDNSKNTLFLEMNSLRVEDTAVYYCARGGGGYMDVWGQGTTVTVS

SEQ ID NO: 28058 - protein, 96 aa, Homo sapiens; identical to SEQ ID NO: 28057

SEQ ID NO: 28059 - protein, 96 aa, Homo sapiens; identical to SEQ ID NO: 28057

SEQ ID NO: 28060 - protein, 95 aa, Homo sapiens
AASGFTFSNYGMIWVRQAPGKGLEWASGINPTGSTTHYADSVKGRFTISRDNSKSTLSLQMNSLRAEDTAVYYCARGGGGYMDVWGKGTTVTVSS

SEQ ID NO: 28061 - protein, 107 aa, Homo sapiens
SGFTFNTYAMSWVRQAPGKGLEWVSSISESGSYSSHSDSVEGRFTISRDNSQNTLYLQMASLRAEDAAVYYCAKGGSKLFRGVTIRAKNYYYYMDVWGKGTTVTVSS

SEQ ID NO: 28062 - protein, 109 aa, Homo sapiens
EVSGFTFNTYAMSWVRQAPGKGLEWVSSISESGSYSSHSDPVEGRFTISRDNSQSTLYLQMESLRVEDAAVYYCAKGGSKLFRGVTIRAKNYYYYMDVWGKGTTVTVSS

SEQ ID NO: 28063 - protein, 93 aa, Homo sapiens
AASGFTFSSYAMSWVRQAPGKGLEWFSTVAINGASTFYADSVTGRFTISRDNSKNMLFLQMNSLRDEDTAVYYCARGGQTDYWGQGTLVTVSS

SEQ ID NO: 28064 - protein, 91 aa, Homo sapiens
ASGFTFAKYAMTWVRQAPGQGLEWISSIVIGGATLYADSVKGRFTISRDNSNNNLYLQMNSLRAEDTAIYYCARGGQTDYWGQGTLVTVSS

SEQ ID NO: 28065 - protein, 98 aa, Homo sapiens
AASGFTFVDFDMSWVRQPPGKGLEWVSTVGLTGGYTVYADSVRGRFSISRDNSKNTLYLEMNSLRAEDTAIYYCVKPPRGFNNASSAWGQGTLVTVSS

SEQ ID NO: 28066 - protein, 98 aa, Homo sapiens
AASGFTFDNYDMSWVRQTPGRGLEWVSAIGPSGTYAFYADSVRGRFTISRDNVKNTVSLQMNSLRAEDTAIYYCVKPPRGFNNASSAWGQGTLVTVSS

SEQ ID NO: 28067 - protein, 98 aa, Homo sapiens
AASGFTFDNYDMSWVRQTPGRGLEWVSAIGPSGTYAFYADSVRGRFTISRDNVRNTVSLQMNSLRAEDTAIYYCVKPPRGFNNASSAWGQGTLVTVSS

SEQ ID NO: 28068 - protein, 98 aa, Homo sapiens
AASGFTFVNFDMSWVRQAPGKGLEWVSAVGLTGVYTVYADSVRGRFTISKDNSRNTVYLQMNSLRAEDTAIYYCVKPPRGFNNASSAWGQGTLVTVSS

SEQ ID NO: 28069 - protein, 98 aa, Homo sapiens
AASGFTFVNFDMSWVRQAPGKGLEWVSAVGLTGVYTVYADSVRGRFTISRDNSKNTVYLQMNSLRAEDTAIYYCVKPPRGFNNASSAWGQGALVTVSS

SEQ ID NO: 28070 - protein, 98 aa, Homo sapiens
AASGFTFVNFDMSWVRQAPGKGLEWVSSVGLTGGYTVYADSVRGRFTISRDNSKNTVYLQMNSLRADDTAIYYCVKPPRGFNNASSAWGQGTLVTVSS

SEQ ID NO: 28071 - protein, 98 aa, Homo sapiens
AGSGFTFVKFDMSWVRQAPGKGLEWVSAVGLTGSYTVYADSVRGRFTISRDNSKNTVYLQMNSLRAEDTAIYYCVKPPRGFNNASSAWGQGALVTVSS

SEQ ID NO: 28072 - protein, 98 aa, Homo sapiens
AASGFTFVDFDMSWVRQPPGKGLEWVSTVGLTGAYTVYADSVRGRFSISRDNSRNTVYLEMNSLRAEDTAIYYCVKPPRGFNNASSAWGQGTLVTVSS

SEQ ID NO: 28073 - protein, 99 aa, Homo sapiens
AASGFTFSTSAMSWVRQAPGKGLEWVSVICGIAENTFYADSVKGRFIMSRGNAQNTLYLQMNSLRAEDTAVYYCAKLNGDSCYSPIDYWGQGALVIVSS

SEQ ID NO: 28074 - protein, 99 aa, Homo sapiens; identical to SEQ ID NO: 28073

SEQ ID NO: 28075 - protein, 99 aa, Homo sapiens
AASGFTFSTSAMSWVRQAPGKGLEWVSVICGIAENTFYADSVKGRFIMSRGNAENTLYLQMNGLRAEDTAVYYCAKLNGDSCYSPIDYWGQGALVIVSS

SEQ ID NO: 28076 - protein, 99 aa, Homo sapiens; identical to SEQ ID NO: 28073

SEQ ID NO: 28077 - protein, 99 aa, Homo sapiens; identical to SEQ ID NO: 28073

SEQ ID NO: 28078 - protein, 99 aa, Homo sapiens
AASGFSFSTSAMSWVRQAPGKGLEWVSVICGIAENTFYADSVKGRFIMSRGNAQNTLYLQMNSLRAEDTAVYYCAKLNGDSCYSPIDYWGQGALVIVSS

SEQ ID NO: 28079 - protein, 93 aa, Homo sapiens
VGSGFTLSNYDMNWVRQAPGKGLEWVSRIEGNGGNINYADSVKGRFTISRDNSKNMLFLQMNSLRAEDTAVYYCASPGRDIGWGQGTMVTVSS

SEQ ID NO: 28080 - protein, 93 aa, Homo sapiens
VGSGFTFTNYDINWVRQAPGKGLEWVSRIEGNGGNINYADSVKGRFTIFRDNSKNMVFLQMNSLRVEDTAVYYCASPGRDIGWGQGTMVTVSS

SEQ ID NO: 28081 - protein, 93 aa, Homo sapiens
VGSGFTFANYDMNWVRQAPGKGLEWVSRIEGNGGNINYADSVKGRFTISRDNSRDMVSLQMNSLRVEDTAVYYCASPGRDIGWGQGTMVTVSS

SEQ ID NO: 28082 - protein, 93 aa, Homo sapiens
VGSGFNLINYDMNWVRQAPGKGLEWVSRIEGNGGNINYADSVKGRFTISRDNSKNMVFLQMNSLRVEDTAVYFCASPGRDIGWGQGTMVTVSS

SEQ ID NO: 28083 - protein, 102 aa, Homo sapiens
TVSGGSISSYYWSWIRQPPGKGLEWIGYMYYSGNTNYNPSLKSRVTISVDTSKNQISLKLSSVTAADTAVYYCARHGDFRFLEWLLPNFDIWGQGTMVTVSS

SEQ ID NO: 28084 - protein, 102 aa, Homo sapiens
TVSGGSISSYYWSWIRQPPGKGLEWIGYMSYSGNTNFNPSLKSRITISVDTSKNQISLKLSSVTAADTAVYFCARHGDFRFLEWLLPNFDIWGQGTMVTVSS

SEQ ID NO: 28085 - protein, 102 aa, Homo sapiens
TVSGGSMSSYYWSWIRQPPGKGLEWIGYMSYSGNTNYNPSLKSRVTISVDTSKNRISLKLSSVTAADTAVYYCARHGDFRFLEWLLPNFDIWGQGTMVTVSS

SEQ ID NO: 28086 - protein, 102 aa, Homo sapiens; identical to SEQ ID NO: 28083

SEQ ID NO: 28087 - protein, 96 aa, Homo sapiens
TVSGGSINNYYWTWIRQPPGKGLEWIGYMSNSGSTDYNPSLKSRVTISVDTSKNQLSLRLSSVTSADTAVYYCARGGYAHAWHFDHWGQGTLVTVS

SEQ ID NO: 28088 - protein, 96 aa, Homo sapiens
TVSGGSVNNYYWTWIRQPPGKGLEWIGYMSNSGRTDYHPSLRSRVTISVDTSKNQLSLRLSSVTSADTAVYYCARGGYAHAWHFDHWGQGTLVTVS

SEQ ID NO: 28089 - protein, 96 aa, Homo sapiens; identical to SEQ ID NO: 28087

SEQ ID NO: 28090 - protein, 96 aa, Homo sapiens
TVSGGSINDYYWTWIRQPPGKGLEWIGYMSNSGSADYNPSLKSRVTISVDTSKNQLSLRLSSVISADTAVYYCARGGYAHAWHFDHWGQGTLVTVS

SEQ ID NO: 28091 - protein, 96 aa, Homo sapiens; identical to SEQ ID NO: 28087

SEQ ID NO: 28092 - protein, 96 aa, Homo sapiens
TVSGDSINNYYWTWIRQPPGKRLEWIGYMSNSGSTDYNPSLKSRVTISVDTSKNQLSLRLTSVTSADTAVYYCARGGYAHAWHFDHWGQGTLVTVS

SEQ ID NO: 28093 - protein, 98 aa, Homo sapiens
TVSGGSINITYYWGWVRQAPAKGLEWIGSIFYSGNTYYNPSLKSRVIISVDTSKNQFSLNLSSVTASDTALYYCVRHSSATHPNFDYWDQGALVAVSS

SEQ ID NO: 28094 - protein, 98 aa, Homo sapiens
SVSGGSINISYYWGWVRQAPAKGLEWIGSIFYSGNTYYNPSLKSRVIVSVDTSKNRFSLKLSSVTAADTALYYCVRHSSATHPNFDYWDQGALVAVSS

SEQ ID NO: 28095 - protein, 98 aa, Homo sapiens
SVSGGSINISYYWGWVRQSPAKGLEWIGSIFYSGNTYYNPSLKSRVIISVDTSKNRFSLKLTSVTAADTALYYCVRHSSATHPNFDYWDQGAPVAVSS

SEQ ID NO: 28096 - protein, 97 aa, Homo sapiens
EASGFTFSTYGMSWVRQAPGKGLEWVAGITNTGVRTNYRDSVKGRFTISRDNSKNTLFLQMNSLGAEDTALYYCTKRNTANTYDDYWGRGTLVTVSS

SEQ ID NO: 28097 - protein, 97 aa, Homo sapiens
EGSGFTFSTYGMSWVRQAPGKGLEWVAGITNTGVRTNYRDSVKGRFTISRDNSKNTLFLQMNSLGAEDTALYYCTKRNTANTYDDYWGRGTLVTVSS

SEQ ID NO: 28098 - protein, 97 aa, Homo sapiens
EGSGFTFSTYGMSWVRQAPGKGLEWVSGITNTGVRTSYRGSVKGRFTISRDNSKNTLFLQMNSLGAEDTALYYCTKRNTANTYDDYWGRGTLVTVSS

SEQ ID NO: 28099 - protein, 103 aa, Homo sapiens
TVSGGSVSSSDYYWGWIRQPPGKGLEWIGSIFNSGSTYYNPSLMSRVTISIDTSKKQFSLKVTSVTAADTAVYYCARHSSQDDYGPGNAFDVWGQGAMVTVSS

SEQ ID NO: 28100 - protein, 103 aa, Homo sapiens
TASGGSISSNNYYWGWIRQPPGKGLEWIGSIFNSGSTYYNPSLMSRVTISIDTSKRQFSLKLSSVTAADTAVYYCARHSSQDDYGPGNAFDVWGQGTMVTVSS

SEQ ID NO: 28101 - protein, 100 aa, Homo sapiens
AASGFTFSSYWMSWVRQAPGKGLEWVANIKQDGSETYCIDSVKGRFTISRDNAKNSLYLQMNSLRAEDTAVYYCARGTEWLDASAVGDYWGQGTLVTVSS

SEQ ID NO: 28102 - protein, 100 aa, Homo sapiens
AASGFTFSRYWMSWVRQAPGKGLEWVANIKQDGSETYCIDSVKGRFTISRDNAKNSLYLQMNRLRAEDTAVYYCARGTEWLDASAVGDYWGQGTLVTVSS

SEQ ID NO: 28103 - protein, 100 aa, Homo sapiens
AASGFTFSRYWMSWVRQAPGKGLEWVANIKQDGSETYCIDSVKGRFTISRDNAKNSLYLQMNSLRAEDTAVYYCARGTEWLDASAVGDYWGQGTLVTVSS

SEQ ID NO: 28104 - protein, 100 aa, Homo sapiens; identical to SEQ ID NO: 28103

SEQ ID NO: 28105 - protein, 100 aa, Homo sapiens
AASGFTFRSYWMSWVRQAPGKGLEWVANIKQDGSETYCIDSVKGRFTISRDNAKNSLYLQMNSLRAEDTAVYYCARGTEWLDASAVGDYWGQGTLVTVSS

SEQ ID NO: 28106 - protein, 100 aa, Homo sapiens
AASGFTFSRYWMSWVRQAPGKGLEWVANIKQDGSETSCIDSVKGRFTISRDNAKNTLYLQMNSLRAEDTAVYFCARGTEWLDASAVGDYWGQGTLVTVSS

SEQ ID NO: 28107 - protein, 100 aa, Homo sapiens
AASGFSFSSYWMSWVRQAPGKGLEWVANIKQDGSETYCIDSVKGRFTISRDNAKNSLYLQMNRLRAEDTAVYYCARGTEWLDASAVGDYWGQGTLVTVSS

SEQ ID NO: 28108 - protein, 100 aa, Homo sapiens
AASGFTFSRYWMSWVRQAPGKGLEWMANIKQDGSETYYIDSVKGRFTISRDNAKNSLYLQMNSLRAEDTAVYYCARGTEWLDASAVGDYWGQGTLVTVSS

SEQ ID NO: 28109 - protein, 100 aa, Homo sapiens
AASGFTFSRYWMSWVRQAPGKGLEWVANIKQDGSETYCIDSVKGRFTISRDNAKNSLYLQMHSLRAEDTAVYYCARGTEWLDASAVGDYWGQGTLVTVSS

SEQ ID NO: 28110 - protein, 100 aa, Homo sapiens; identical to SEQ ID NO: 28103

SEQ ID NO: 28111 - protein, 101 aa, Homo sapiens
AASGFTFSNYAMHWVRQVPGKGLEWVAVVWYDGSNKFYADSVKGRFTISRDNSRDTMYLQMNSLRAEDTALYLCARDSYSNEPRRGGFDSWGRGTLVIVSS

SEQ ID NO: 28112 - protein, 101 aa, Homo sapiens; identical to SEQ ID NO: 28111

SEQ ID NO: 28113 - protein, 101 aa, Homo sapiens
AASGFTFSNYAMHWVRQVPGKGLEWVAVVWYDGSNKFYVDSVKGRFTISRDNSRDTLYLQMNSLRAEDTALYFCARDSYSNEPRRGGFDSWGRGTLVIVSS

SEQ ID NO: 28114 - protein, 101 aa, Homo sapiens
AASGFTFSNYAMHWVRQVPGKGLEWVAVVWYDGSNKFYADSVKGRFTISRDNSRDTLYLQMNSLRVEDTALYFCARDSYSNEPRRGGFDSWGRGTLVTVSS

SEQ ID NO: 28115 - protein, 101 aa, Homo sapiens
AASGFTFSNYAMHWVRQVPGKGLEWVAVVWYDGSNKFYADSVKGRFTISRDNSRDTLYLQMNSLRAEDTALYFCARDSYSNEPRRGGFDSWGRGTLVIVSS

SEQ ID NO: 28116 - protein, 101 aa, Homo sapiens
AASGFTFSNYAMHWVRQVPGKGLEWVAVVWFDGSNKFYADSVKGRFTISRDNSRDTLYLQMNSLRAEDTALYVCARDSYSNEPRRGGFDSWGRGTLVTVSS

SEQ ID NO: 28117 - protein, 101 aa, Homo sapiens
AASGFTFSNYAMHWVRQVPGKGLEWVAVVWYDGSNKFYADSVKGRFTISRDNSRDTLYLQMNTLRAEDTALYFCARDSYSNEPRRGGFDSWGRGTLVIVSS

SEQ ID NO: 28118 - protein, 101 aa, Homo sapiens
AASGFTFSNYAMHWVRQVPGKGLEWVAVVWFDGSNKFYADSVKGRFTISRDNSRDTLYLQMNSLRAGDTALYVCARDSYSNEPRRGGFDSWGRGTLVTVSS

SEQ ID NO: 28119 - protein, 100 aa, Homo sapiens
ASGFTFSNYAMHWVRQVPGKGLEWVAVVWFDGSNKFYADSVKGRFTISRDNSRDTLYLQMNSLRAEDTALYVCARDSYSNEPRRGGFDSWGRGTLVTVSS

SEQ ID NO: 28120 - protein, 98 aa, Homo sapiens
AASGFTFSNYAMHWVRQVPGKGLEWVAVVWFDGSNKFYADSVKGRFTISRDNSRDTLYLQMRAEDTALYVCARDSYSNEPRRGGFDSWGRGTLVTVSS

SEQ ID NO: 28121 - protein, 100 aa, Homo sapiens
AVSGFIFSDYHIDWVRQAPGKGLEWVGRVRRKADRHSTEYGASVKGRFTLSRDDSNNAVYLQMNSLKSEDSAFYYCVRVTHTERYSFDNWGQGTLVTVSS

SEQ ID NO: 28122 - protein, 100 aa, Homo sapiens
AVSGFIFSDYHIDWVRQAPGKGLEWVGRVRRKADRHTTEYGASVKGRFTLSRDDSNNAVYLQMNSLKSEDSAFYYCVRVTHTERYSFDNWGQGTLVTVSS

SEQ ID NO: 28123 - protein, 98 aa, Homo sapiens
SGFIFTDYHIDWVRQAPGKGLEWVGRVRRKADRHSTEYGASAKGRFTLSRDDSRNAVFLQMDSLRSEDSAFYYCVRVTHTERYSFDNWGQGTLVTVSS

SEQ ID NO: 28124 - protein, 97 aa, Homo sapiens
AASGFTFSSYAMNWVRQAPGKGLEWVSGISASGGTTYSADAVKGRFTISRDNSLNTLSLQMDGLRAEDTAVYYCARGSLRRYYFDYWGQGTLVSVSS

SEQ ID NO: 28125 - protein, 97 aa, Homo sapiens
AASGFTFSSYAMNWVRQAPGKGLEWVSGISASGGTTYSADTVKGRFTISRDNSLDTVSLQMDGLRTEDTAVYYCARGSLRRYYFDYWGQGTLVTVSS

SEQ ID NO: 28126 - protein, 97 aa, Homo sapiens; identical to SEQ ID NO: 28124

SEQ ID NO: 28127 - protein, 97 aa, Homo sapiens; identical to SEQ ID NO: 28124

SEQ ID NO: 28128 - protein, 101 aa, Homo sapiens
AASGFTFSTSAMNWVRQTPRKGLEWVSTVDAVGSATWYADSVKGRFTISRDNSKDTLYLQMDSLRVDDTALYFCAKGRFDCTSPSCNPDYWGQGTLVTVSS

SEQ ID NO: 28129 - protein, 101 aa, Homo sapiens
AASGFTFSSSAMNWVRQAPGKGLEWVSTVNGVGSVTRYADSVKGRFTISRDNSKYTLYLQMDSLRVEDTALYFCAKGRFDCTSPSCNPDYWGQGTLVTVSS

SEQ ID NO: 28130 - protein, 93 aa, Homo sapiens
VASGFTFSNFWMNWVRQAPGKGLEWVANINGDGSEKHYVDSLKGRFTISRDNAKNSLYLQLNSLRAEDTAVYYCFYGHYSDYWGQGTLVTVSS

SEQ ID NO: 28131 - protein, 93 aa, Homo sapiens
VGSGMSLSVYWMNWVRQAPGKGLEWVANINGDGSEIYYVDSVKGRFTISRDNAKNSVSLQMNSLRAEDTAVYYCFYGHYSDYWGRGTLVTVSS

SEQ ID NO: 28132 - protein, 93 aa, Homo sapiens
VGSGMSLSVYWMNWVRQAPGKGLEWVANINGDGSEIYYVDSVKGRFTISRDNAKNSVSLQMNSLRAEDTAVYYCFYGHYSDYWGRGTPVTVSS

SEQ ID NO: 28133 - protein, 93 aa, Homo sapiens
VGSGISLSAYWMNWVRQAPGKGLEWVANIKGDGSEIYYVDSVKGRFTISRDNAKNSVSLQMNSLRAEDTAVYFCFYGHYSDYWGRGTLVTVSS

SEQ ID NO: 28134 - protein, 97 aa, Homo sapiens
AASGFTFSSYAMSWVRQAPGKGLDWVSAISDSGGSTYYADSVKGRFTISRDNSKNTLFLQLNSLRPEDTAVYYCAKRIQLNYFFDYWGQGTLVTVSS

SEQ ID NO: 28135 - protein, 97 aa, Homo sapiens; identical to SEQ ID NO: 28134

SEQ ID NO: 28136 - protein, 97 aa, Homo sapiens
AASGFTFSTYAMAWVRQAPGKGLDWVAAISDSGASTYYADSVKGRFTISRDNSKNTLFLQLNSLRPEDTAVYYCAKRIQLNYFFDYWGQGTLVTVSS

SEQ ID NO: 28137 - protein, 97 aa, Homo sapiens
AASGFTFSSYAMSWVRQAPGKGLDWVSAISDSGGSTYYVDSVKGRFTISRDNSKNTLFLQLNSLRPEDTAVYYCAKRIQLNYFFDYWGQGTLVTVSS

SEQ ID NO: 28138 - protein, 96 aa, Homo sapiens
SASGFTLSAYAIHWVRQAPGKGLEYVSAISSDGGATYYADSVKDRFTISRDNSRNTLYLQVSSLRAGDTAVYYCVRALQWSYLDYWGQGTLVTVSS

SEQ ID NO: 28139 - protein, 96 aa, Homo sapiens
SASGFTLSAYAIHWVRQAPGKGLEYVSAISSDGFVTYYADSMKDRFTISRDNSRNTLYLQMSSLRAGDTAVYYCVRALQWSYLDYWGQGALVTVSS

SEQ ID NO: 28140 - protein, 96 aa, Homo sapiens
SASGFTLSAYAFHWVRQAPGKGLEYVSAISSDGTATYYADSVKGRFTISRDNSRNTLFLQVSSLRAGDTAVYYCVRALQWSYLDYWGQGTLVTVSS

SEQ ID NO: 28141 - protein, 101 aa, Homo sapiens
GGTFTTYGLTWVRQAPGRGLEWMGAIIPLLGSTSYPQKFQDRVTVTADRFAATAHLQLRSLTSDDTAVYYCARGRIVTTNGDRIYQYMDIWGKGTTVIVSS

SEQ ID NO: 28142 - protein, 101 aa, Homo sapiens
GGTFTTYGLTWVRQAPGRGLEWMGAIIPLLGSTFYPQKFQDRVTVTADRFAATAHLQLRSLTSDDTAVYYCARGRIVTTNGDRIYQYMDIWGKGTTVIVSS

SEQ ID NO: 28143 - protein, 99 aa, Homo sapiens
KGSGYSFTNYWIGWVRQVPGKGLEWVAIIFPADSDTAYNPSFQGQVTISADKSISTAYLQWSSLKASDTAMYYCARRLRYHSGGYFDLWGRGTLVTVSS

SEQ ID NO: 28144 - protein, 99 aa, Homo sapiens; identical to SEQ ID NO: 28143

SEQ ID NO: 28145 - protein, 91 aa, Homo sapiens
AASGFTFSTSWMNWVRQAPGKGLEWVANINGDESVKRYVDSVKGRFTVSRDNTKNSLYLQMNSLRAEDTAVYYCVRADDIWGQGTMVSVSS

SEQ ID NO: 28146 - protein, 91 aa, Homo sapiens
AASRFTFSTSWMNWVRQAPGKGLEWVANINENESVKRYVDSVKGRFTISRDNAKNSLYLQMNSLRAEDTAVYYCVRADDIWGQGTVVTVSS

SEQ ID NO: 28147 - protein, 95 aa, Homo sapiens
AASGFTFSHYTMNWVRQAPGKGLEWISYINSDSTITWYADSVRGRFTISRDNAKNSLSLQMTSLRDEDTAVYFCVRDHWWAFDVWGQGTLVTVSS

SEQ ID NO: 28148 - protein, 95 aa, Homo sapiens
AASGFTFSHFTMNWVRQAPGKGLEWISYIYGDSTIIWYADSVKGRFTISRDNAKNSLSLQMNSLRDEDTAVYYCVRDHWWAFDVWGQGTVVTVSS

SEQ ID NO: 28149 - protein, 101 aa, Homo sapiens
TVSGVSVRTSGYYLSWIRQPPGKGLEFIGHISNGGSTNYNPSLKSRVTISVDTSKNQLFLHLSSVTAADTAVYYCGRSDRSGSSFVEFDYWGQGTLVTVSS

SEQ ID NO: 28150 - protein, 101 aa, Homo sapiens
TASGGSIRISGYYLSWIRQTPGKGLEFIGHISSGGSTYYNPSLRSRVTISVDTSTNQLSLHLSSVTAADTAVYYCGRSDRSGSSFVEFDYWGQGTLVTVSS

SEQ ID NO: 28151 - protein, 101 aa, Homo sapiens
TVSGVSVRSSGYYLSWIRQPPGKGLEFVGHISNGGSTNYNPSLKSRVTISVDTSKNQLSLHLNSVTAADTAVYYCGRSDRSGSSFVEFDYWGQGTLVTVSS

SEQ ID NO: 28152 - protein, 101 aa, Homo sapiens
TVSGVSVRTSGYYLNWVRQPPGKGLEFIGHISYGGTTNYNPSLKSRVTISVDTSKNQLSLHLSSVTAADTAVYYCGRSDRSGSSFVEFDYWGQGTLVTVSS

SEQ ID NO: 28153 - protein, 101 aa, Homo sapiens
TVSGGSVRSSGYYLSWIRQPPGKGLEFIGHISSGGSTNYNPSLKSRVTISVDTSGNQLSLYLSSVTAADTAVYYCGRSDRSGSSFVEFDYWGQGTLVTVSS

SEQ ID NO: 28154 - protein, 101 aa, Homo sapiens; identical to SEQ ID NO: 28150

SEQ ID NO: 28155 - protein, 101 aa, Homo sapiens
TVSGASVRSSGYYLTWIRQTPGKGLEFIGYISSGGNTNYNPSLKSRVTISVDTSKNQLSLHLSSVTAADTAVYYCGRSDRSGSSFVEFDYWGQGTLVTVSS

SEQ ID NO: 28156 - protein, 99 aa, Homo sapiens
ASGYTFTSFGISWVRQAPGQGLEWMGWISAYNANTNYAQKFQGRVTMTTDTSTTTAYMELRSLSSDDSAVYYCARDVGFVNGYYYMDVWGKGTTVTVSS

SEQ ID NO: 28157 - protein, 99 aa, Homo sapiens; identical to SEQ ID NO: 28156

SEQ ID NO: 28158 - protein, 98 aa, Homo sapiens
VASGFTFNNYAMRWVRQAPGKGLEWVSTILDGGTGTAYADSVKGRFTISRDNSKNTVTLQMNSLRAEDTAVYFCVKGGPSGSYFCDYWAQGTQVTVSS

SEQ ID NO: 28159 - protein, 98 aa, Homo sapiens
VASGFTFSNYAMRWVRQTPGKGLEWVSTILDGGTVTAYADSVKGRFTISRDNSKNTVTLQMNSLRAEDTAVYFCVKGGPSGSYFCDYWAQGMQVTVSS

SEQ ID NO: 28160 - protein, 99 aa, Homo sapiens
AASGFSFSTYAMNWLRQAPGKGLEWVSVIVGGGGGITYADSVKGRFTISRDNSKNTLYLQMNDLRVEDTAIYYCAKDLQPDGRYDLDYWGRGTLVTVSS

SEQ ID NO: 28161 - protein, 99 aa, Homo sapiens
AASGFTFSTYAMNWVRQAPGKGLEWVSVIVGDGSSRHYADSVKGRFTISRDNAKNILYLQMDTLRADDTAIYYCAKDLQPDGRYDLDYWGRGTLVAVSS

SEQ ID NO: 28162 - protein, 101 aa, Homo sapiens
ATSGFTFSSHWMTWVRQAPGKGLEWVANLNFGGSEKYYVDSVKGRFTISRDNAKNSLYLQMNSLRAEDTAVYYCARVRFARTYYSNYMDVWGKGTTVTVSS

SEQ ID NO: 28163 - protein, 101 aa, Homo sapiens
ATSGFTFSSHWMTWVRQAPGKGLEWVANLNFGGSEKYYVDSVKGRFTISRDNAKNSLYLQMNSLRAEDTAVYYCARVRFARTYYSNYMDVWGTGTTVTVSS

SEQ ID NO: 28164 - protein, 101 aa, Homo sapiens
ATSGFTFSSHWMTWVRQAPGKGLEWVANMNFGGSEKYYVDSVKGRFTISRDNAKNSLYLQMNSLRAEDTAVYYCARVRFARTYYSNYMDVWGKGTTVTVSS

SEQ ID NO: 28165 - protein, 100 aa, Homo sapiens
ATSGFTFSSHWMTWVRQAPGKGLEWVANLNFGGSEKYYVDSVKGRFTISRDNAKNSLYLQMNSLRAEDTAVYYCARVRFARTYYSNYMDVWGKGPRSPSP

SEQ ID NO: 28166 - protein, 94 aa, Homo sapiens
AASGFTLSNYWVTWVRQAPGKGLEWVANIRHNGSLKYYVDSVKGRFTISRDNAENLVYLQMNSLRVEDTAIYYCASRQDCGGYWGPGTLVTVSS

SEQ ID NO: 28167 - protein, 94 aa, Homo sapiens
AASGFILSNYWVTWVRQAPGKGLEWVANIRHDGSLKYYVDSVKGRFTISRDNAENSVYLQMNSLRVEDTAIYYCASRQDCGGYWGPGTLVTVSS

SEQ ID NO: 28168 - protein, 94 aa, Homo sapiens
AASGFTLSEYWVTWVRQAPGKGLEWVANIRHDASLKYYVDSVKGRFTISRDNAENLVYLQMKSLRLEDTGTYYCASRQDCGGYWGPGTQVTVSS

SEQ ID NO: 28169 - protein, 94 aa, Homo sapiens
AASGFTLSNYWVTWVRQAPGKGLEWVANIRHDGSLKYYVDSVKGRFTISRDNAENLVYLQMNSLRVEDTAIYYCASRQDCGGYWGPGTLVTVSS

SEQ ID NO: 28170 - protein, 94 aa, Homo sapiens; identical to SEQ ID NO: 28166

SEQ ID NO: 28171 - protein, 94 aa, Homo sapiens
AASGFILSNYWVTWVRQAPGKGLEWVANIRHDGSLKYYVDSVKGRFTISRDNADNSVYLQMNSLRVEDTAIYYCASRQDCGGYWGPGTLVTVSS

SEQ ID NO: 28172 - protein, 94 aa, Homo sapiens; identical to SEQ ID NO: 28167

SEQ ID NO: 28173 - protein, 93 aa, Homo sapiens
ASGFILSNWWVTWVRQAPGKGLEWVANIRHDGSLKFYVDSVKGRFTISRDNAENSVYLQMNSLRVEDTGIYYCASRQDCGGYWGPGTLVTVSS

SEQ ID NO: 28174 - protein, 94 aa, Homo sapiens
AASGFILSNYWMTWVRQAPGKGLEWVANIRHDGSLKYYVDSVKGRFTISRDNAENSVYLQMNSLRVEDTAIYYCASRQDCGGYWGPGTLVTVSS

SEQ ID NO: 28175 - protein, 96 aa, Homo sapiens
ASGYSFTSNWIGWVRQTPGKGLEWMGIIYPGDSDTRYSPSFQGQVTISADKSISTSYLQWSSLKASDTAMYYCARHDRSGWYSDYWGQGTLVTVSS

SEQ ID NO: 28176 - protein, 96 aa, Homo sapiens; identical to SEQ ID NO: 28175

SEQ ID NO: 28177 - protein, 96 aa, Homo sapiens; identical to SEQ ID NO: 28175

SEQ ID NO: 28178 - protein, 103 aa, Homo sapiens
AASGFTFSSYGMHWVRQAPGKGLEWVAVISYDGSNKYYADSVKGRFTISRDNSKNTLYLQMSSLRAEDTALYYCAKDPANWGPSYYYYYMDVWGKGTTVTVSS

SEQ ID NO: 28179 - protein, 103 aa, Homo sapiens; identical to SEQ ID NO: 28178

SEQ ID NO: 28180 - protein, 103 aa, Homo sapiens; identical to SEQ ID NO: 28178

SEQ ID NO: 28181 - protein, 103 aa, Homo sapiens; identical to SEQ ID NO: 28178

SEQ ID NO: 28182 - protein, 103 aa, Homo sapiens
GSSGFAFSYYWMHWVRQAPGKGLEWVSRIDGDGLSRIYVDSVKGRFTTSRDNAKNTVYLQMDSLRVEDTATYYCVRDVCYSTGCRVPGAFENWGRGTLVTVSS

SEQ ID NO: 28183 - protein, 103 aa, Homo sapiens
GSSAFAFSYYWMHWVRQAPGKGLEWVSRIDGDGLSRIYVDSVKGRFTTSRDNAKNTVYLQMDSLRVEDTATYYCVRDVCYSTGCRVPGAFENWGRGTLVTVSS

SEQ ID NO: 28184 - protein, 103 aa, Homo sapiens; identical to SEQ ID NO: 28182

SEQ ID NO: 28185 - protein, 103 aa, Homo sapiens
GSSGFAFSYYWMHWVRQAPRKGLEWVSRIDGDGLSRIYVDSVKGRFTTSRDNAKNTVYLQMDSLRVEDTATYYCVRDVCYSTGCRVPGAFENWGRGTLVTVSS

SEQ ID NO: 28186 - protein, 103 aa, Homo sapiens; identical to SEQ ID NO: 28182

SEQ ID NO: 28187 - protein, 101 aa, Homo sapiens
SGFAFSYYWMHWVRQAPGKGLEWVSRIDGDGLSRIYVDSVKGRFTTSRDNAKNTVYLQMDSLRVEDTATYYCVRDVCYSTGCRVPGAFENWGRGTLVTVSS

SEQ ID NO: 28188 - protein, 103 aa, Homo sapiens; identical to SEQ ID NO: 28182

SEQ ID NO: 28189 - protein, 103 aa, Homo sapiens; identical to SEQ ID NO: 28182

SEQ ID NO: 28190 - protein, 103 aa, Homo sapiens; identical to SEQ ID NO: 28182

SEQ ID NO: 28191 - protein, 103 aa, Homo sapiens
GSSGFAFSYYWMHWVRQAPGKGLEWVSRIDGDGLSRIYVDSVKARFTTSRDNAKNTVYLQMDSLRVEDTATYYCVRDVCYSTGCRVPGAFENWGRGTLVTVSS

SEQ ID NO: 28192 - protein, 103 aa, Homo sapiens
GSSGFAFSYYWMHWVRQAPGKGLEWVSRIDGDGLSRIYVDSVKGRFTTSRDNAKNTVYLQMDSLRVEDTATYYWVRDVCYSTGCRVPGAFENWGRGTLVTVSS

SEQ ID NO: 28193 - protein, 103 aa, Homo sapiens; identical to SEQ ID NO: 28182

SEQ ID NO: 28194 - protein, 103 aa, Homo sapiens; identical to SEQ ID NO: 28182

SEQ ID NO: 28195 - protein, 103 aa, Homo sapiens
GSSGFAFSYYWMHWVRQAPGKGLEWVSRIDGDGLSKIYVDSVKGRFTTSRDNAKNTVYLQMDSLRVEDTATYYCVRDVCYSTGCRVPGAFENWGRGTLVTVSS

SEQ ID NO: 28196 - protein, 103 aa, Homo sapiens; identical to SEQ ID NO: 28182

SEQ ID NO: 28197 - protein, 103 aa, Homo sapiens; identical to SEQ ID NO: 28182

SEQ ID NO: 28198 - protein, 102 aa, Homo sapiens
TSGFSFSYHAMDWIRRAPGKGLEWVSRIDGDGLSRIYVDSVKGRFTTSRDNAKNTVYLQMDSLRVEDTATYYCVRDVCYSTGCRVPGAFENWGRGTLVTVSS

SEQ ID NO: 28199 - protein, 103 aa, Homo sapiens
GSSGFAFSYYWMHWVRQAPGKGLEWVSRIDDDGLSRIYVDSVKGRFTTSRDNAKNTVYLQMDSLRVEDTATYYCVRDVCYSTGCRVPGAFENWGRGTLVTVSS

SEQ ID NO: 28200 - protein, 103 aa, Homo sapiens; identical to SEQ ID NO: 28182

SEQ ID NO: 28201 - protein, 103 aa, Homo sapiens
GSSGFAFSYYWMYWVRQAPGKGLEWVSRIDGDGLSRIYVDSVKGRFTTSRDNAKNTVYLQMDSLRVEDTATYYCVRDVCYSTGCRVPGAFENWGRGTLVTVSS

SEQ ID NO: 28202 - protein, 91 aa, Homo sapiens
AASRFTFSNSWMNWVRQAPGKGLEWVANINQDESVRRYVDSVKGRFTVSRDNAKNSLYLQMNSLRAEDTAVYYCVRGEDIWGQGTMVSVSS

SEQ ID NO: 28203 - protein, 91 aa, Homo sapiens
AASRFTFSNSWMNWVRQAPGKGLEWVANINENESVRRYVDSVKGRFTVSRDNAKNSLYLQMNSLRAEDTAVYYCVRGEDIWGQGTMVSVSS

SEQ ID NO: 28204 - protein, 91 aa, Homo sapiens
AASRFSFSDSWMNWVRQAPGKGLEWVANINENESVRRYVDSVKGRFTVSRDNAKNSLFLQMNSLRAEDTAVYYCVRGEDIWGQGTMVSVSS

SEQ ID NO: 28205 - protein, 91 aa, Homo sapiens; identical to SEQ ID NO: 28203

SEQ ID NO: 28206 - protein, 91 aa, Homo sapiens; identical to SEQ ID NO: 28203

SEQ ID NO: 28207 - protein, 91 aa, Homo sapiens
AASGITVTNSWMNWVRQAPGKGLEWVANINENEGVRRYVDSVKGRFTVSTDNAKNSLYLQMNSLRAEDTAVYYCVRGEDIWGQGTMVSVSS

SEQ ID NO: 28208 - protein, 91 aa, Homo sapiens; identical to SEQ ID NO: 28203

SEQ ID NO: 28209 - protein, 91 aa, Homo sapiens
AASGFTFSNSWMNWVRQAPGKGLEWVANINGDESVRRYVDSVKGRFTVSRDNAKNSLYLQMNSLRAEDTAVYYCVRGEDIWGQGTMVSVSS

SEQ ID NO: 28210 - protein, 91 aa, Homo sapiens
AASGFTFSNSWMNWVRQAPGKGLEWVANINGDESVRRYVDSVKGRFTVSRDNAKNSLYLQMNSLRAEDTAVYYCVRGEDIWGQGTMVSVFS

SEQ ID NO: 28211 - protein, 91 aa, Homo sapiens
AASRFTFSNSWMNWVRQAPGKGLEWVANINENESVRRYMDSVKGRFTVSRDNAKNSLYLQMNSLRAEDTAVYYCVRGEDIWGQGTMVSVSS

SEQ ID NO: 28212 - protein, 100 aa, Homo sapiens
ISGDSVSSDSVAWNWIRQSPSRGLEWLGRTQYRSKWSHDYAVSVKSRISINSDTSKNQFSLQLNSVTPEDTAVYYCVRDTSARGIYMDVWSTGTTVTVSS

SEQ ID NO: 28213 - protein, 100 aa, Homo sapiens
ISGDSVSSNSVAWNWIRQSPSRGLEWLGRTHYRSKWNNDYAQSVKSRITINPDTSKNQFSLQLNSVTPEDTAVYYCVRDTSARGIYMDVWGKGTTVTVSS

SEQ ID NO: 28214 - protein, 100 aa, Homo sapiens
ISGDSVSSDSVAWNWIRQSPSRGLEWLGRTQYRSEWSHDYAVSVKGRISINSDTSKNQLSLQLNSVTPEDTAVYYCVRDTSARGIYMDVWSTGTTVTVSS

SEQ ID NO: 28215 - protein, 100 aa, Homo sapiens; identical to SEQ ID NO: 28212

SEQ ID NO: 28216 - protein, 100 aa, Homo sapiens
ISGDSVSSDSVAWNWIRQSPSRGLEWLGRTQYRSKWMYDYAQSVKSRITINADTAKNQFSLQLNSVTPDDTALYYCVRDTSARGIYMDVWGKGTTVTVSS

SEQ ID NO: 28217 - protein, 100 aa, Homo sapiens
ISGDSVSSNSVAWNWIRQSPSRGLEWLGRTHYRSKWYNDYAQSVKSRITINPDTSKNQFSLQLNSVTPEDTAVYYCVRDTSARGIYMDVWGKGTTVTVSS

SEQ ID NO: 28218 - protein, 100 aa, Homo sapiens
ISGDSVSSDSVAWNWIRQSPSRGLEWLGRTQYRSKWSHDYAVSVKSRISINSDTSKNQLSLQLNSVTPEDTAVYYCVRDTSARGIYMDVWSTGTTVTVSS

SEQ ID NO: 28219 - protein, 100 aa, Homo sapiens
VASGFSFSDHPMTWVRQAPGKGLEWVSTISAGSGTYYVDSVTGRFTISRDNARDTLYLQMNSLRVDDTAIYYCAKGSLQPSRSYGLFESWGQGTLVTVSS

SEQ ID NO: 28220 - protein, 100 aa, Homo sapiens
VASGFSFSDHPMTWVRQAPGKGLEWVSTISAGSGTYYVDSVTGRLTISRDNARDTLYLQMNSLRVDDTAIYYCAKGSLQPSRSYGLFESWGQGTLVTVSS

SEQ ID NO: 28221 - protein, 100 aa, Homo sapiens
AASGFSFSDHPMTWVRQAPGKGLEWVSTISAGSGTYYVDSVTGRFTISRDNARDTLYLQMNSLRVDDTAIYYCAKGSLQPSRSYGLFESWGQGTLVTVSS

SEQ ID NO: 28222 - protein, 96 aa, Homo sapiens
ISGDSVSSNTFNWDWIRQLPSGGLEWLGRTYYSSKWYTDYAGSVKSRIIISADTSRNQFSLQLNSVTPEDTAVYYCARQFRGGMDVWGEGTTVTVS

SEQ ID NO: 28223 - protein, 96 aa, Homo sapiens
ISGDSVSSNTVNWDWIRQLPSGGLEWLGRTYYNSKWYTDYAGSVKSRIIISADTSRNQFSLQLNSVTPEDTAVYYCARQFRGGMDVWGEGTTVTVS

SEQ ID NO: 28224 - protein, 96 aa, Homo sapiens
ISGDSVSSNTVNWDWIRQLPSGGLEWLGRTYYNSKWYTDYAGSVKSRIIISADTSRSQFSLQLNSVTPEDTAVYYCARQFRGGMDVWGEGTTVTVS

SEQ ID NO: 28225 - protein, 96 aa, Homo sapiens; identical to SEQ ID NO: 28223

SEQ ID NO: 28226 - protein, 100 aa, Homo sapiens
ASGFTFTSYNFHWVRRAPGKGLEWVATISNDGAEKYNSESVTGRFTVSRDVSGNSISLLMNSLRPEDTALYYCARDTLPFDSWTGGSGYWGHGTLVTVSS

SEQ ID NO: 28227 - protein, 100 aa, Homo sapiens
ASGFTLTSYNFHWVRRAPGKGLEWVATISYDGAERYNSESVTGRFTVSRDVSGNSISLLMNSLRPEDTAVYYCARDTLPFDSWTGGSGYWGHGTLVTVSS

SEQ ID NO: 28228 - protein, 98 aa, Homo sapiens
VASGFTFSLYAMHWVRHVPGKGLEYVAVVSGNGASTHYSDSVEGRFTISRDNSKNTVHLHMGSLSVDDTGVYFCARGYSFNFPYFDYWGQGTLVSVFS

SEQ ID NO: 28229 - protein, 98 aa, Homo sapiens
VASGFTFSLYAMHWVRHVPGKGLEYVAVVSGNGASTHYSDSVEGRFTISRDNSKNTVHLQMGSLSVDDTGVYFCARGYSFNFPYFDYWGQGTLVSVFS

SEQ ID NO: 28230 - protein, 103 aa, Homo sapiens
TVSGGSISTYYWSWIRQPPGKGLEWIGYIYYSGSTNYNPSLKSRVTISVDTSKNQFSLKLSSVTAADTAVYYCARDGYDYVWGSYRQGWFDPWGQGTLVTVSS

SEQ ID NO: 28231 - protein, 102 aa, Homo sapiens
SVSGGSMSTYYWSWLRQSPGKGLEWIGYVYDSGITNYNPSFESRVTISIDTSTNQFSLKLTSVTAADTAVYYCARDGYDYVWGSYRQGWFDPWGQGSLVTVS

SEQ ID NO: 28232 - protein, 103 aa, Homo sapiens
SVSGGSISSGNYYWAWYRQPPGMGLEWIGTVYYTGTAYYTRSLQSRVTMSVDTSKNHFSLKLSSVTAADTAVYYCARSAGRGYSGYAYYVDPWGQGTLVTVSS

SEQ ID NO: 28233 - protein, 103 aa, Homo sapiens
SVSGGSISSGNYYWAWYRQPPGMGLEWIGTVYYTGTPYYTRSLQSRVTMSVDTSKNHFSLKLSSVTAADTAVYYCARSAGRGYSGYAYYVDPWGQGTLVTVSS

SEQ ID NO: 28234 - protein, 103 aa, Homo sapiens
SVSGGSISSGNYYWAWYRQPPGMGLEWIGTVYYTGTAYYTRSLQSRVTMSVDTSKNQFSLKLSSVTAADTAVYYCARSAGRGYSGYAYYVDPWGQGTLVTVSS

SEQ ID NO: 28235 - protein, 106 aa, Homo sapiens
SVSGGSISSGGYYWSWIRQHPGKGLEWIGYIYHSGSTYYDPSLKSRVTISVDTSKNQFSLKVSSVTAADTAVYYCARDRRGSRSSSHSYYSYMDVWGKGTTVTVSS

SEQ ID NO: 28236 - protein, 106 aa, Homo sapiens; identical to SEQ ID NO: 28235

SEQ ID NO: 28237 - protein, 106 aa, Homo sapiens
TVSGGSISSGGYYWSWIRQHPGKGLEWIGYIYHSGSTYYHPSLKSRVTISVDTSKNQFSLKVSSVTAADTAVYYCARDRRGSRSSSHSYYSYMDVWGKGTTVTVSS

SEQ ID NO: 28238 - protein, 102 aa, Homo sapiens
ASGYTFTNYYMHWVRQAPGQGLEWMGIINTSGGSTSYAQKFQGRVTVTRDTSTSTVYMELSSLRSEDTAVYYCARDGIGVVPAALGNWFDPWGQGTLVTVSS

SEQ ID NO: 28239 - protein, 102 aa, Homo sapiens
ASGYTFTNYYMHWVRQAPGQGLEWMAIINTSGGSTSYAQKLQGRVTVTRDTSTSTVYMELSSLRSEDTAVYYCARDGIGVVPAALGNWFDPWGQGTLVTVSS

SEQ ID NO: 28240 - protein, 102 aa, Homo sapiens; identical to SEQ ID NO: 28239

SEQ ID NO: 28241 - protein, 97 aa, Homo sapiens
KASGYSFTTYWIAWVRQMPGKGLEWMGIIYLGDSDTKYSPSFQGQVTISADKSISAAYLQWSSLKASDTAMYYCARQRNSKSSFDSWGQGTLVTVSS

SEQ ID NO: 28242 - protein, 97 aa, Homo sapiens
KASGYSFTTYWIGWVRQMPGKGLEWMGIIYLGDSDTKYSPSFQGQVTISADKSISAAYLQWSSLKASDTAMYYCARQRNSKSSFDSWGQGTLVTVSS

SEQ ID NO: 28243 - protein, 97 aa, Homo sapiens; identical to SEQ ID NO: 28241

SEQ ID NO: 28244 - protein, 97 aa, Homo sapiens; identical to SEQ ID NO: 28242

SEQ ID NO: 28245 - protein, 97 aa, Homo sapiens; identical to SEQ ID NO: 28242

SEQ ID NO: 28246 - protein, 99 aa, Homo sapiens
AASEFTFSSHAMSWVRQAPGKGLEWVSAISHSGGSTHYADSVKGRFTISRDNSKNTLYLQMNGLRAEDTAVYYCAKGAWRQLGSYFDYWGQGTLVTVSS

SEQ ID NO: 28247 - protein, 99 aa, Homo sapiens; identical to SEQ ID NO: 28246

SEQ ID NO: 28248 - protein, 94 aa, Homo sapiens
AASGFMFSSHEMSWVRQAPGKGLEWVATITNGGYTIHYAASVKGRFTISRDNAKGLLFLQMNDLRGADTGLYYCANLWSSWGYWGQGTQVTVSS

SEQ ID NO: 28249 - protein, 94 aa, Homo sapiens; identical to SEQ ID NO: 28248

SEQ ID NO: 28250 - protein, 97 aa, Homo sapiens
TVSGGSISPYYWSWIRQPPGKGLEWIGDIYYSGSTNYNPSLKSRVTISLDTSKNQFSLNLASVTAADTAVYYCARKVYANFYYMDVWGKGTTVTVSS

SEQ ID NO: 28251 - protein, 96 aa, Homo sapiens
VSGVSISPYYWSWIRQPPGKGLEWIGDIYYSGSTNYNPSLKSRVTISVDTSKNQFSLKLTSVTAADTAVYYCARKVYANFYYMDVWGKGTTVTVSS

SEQ ID NO: 28252 - protein, 97 aa, Homo sapiens
TVSGDSISRYYWSWIRQPPGKGLEWIGEIYYTGSTNYNPSLKSRVTISLDTSMNHFSLMVTSVTAADTAVYYCARKVYANFYYMDVWGKGTTVTVSS

SEQ ID NO: 28253 - protein, 113 aa, Homo sapiens
AASGFTFSTYYMTWVRQAPGQGLEWVSSISYTSGDIFYSDSVKGRFTISRDNAQNSLYLQMNSLGVDDTAVYYCARGGAQFGPWVAGLGIHGYYHHYYYMDVWGQGTPVTVSS

SEQ ID NO: 28254 - protein, 113 aa, Homo sapiens
VASGFTFTTYYMTWVRQAPGQGLEWVSSISYTSGDIFYSDSVKGRFTISRDNAQNSLYLQMNSLGVDDTAVYYCARGGAQFGPWVAGLGIHGYYHHYYYMDVWGQGTPVTVSS

SEQ ID NO: 28255 - protein, 113 aa, Homo sapiens
AASGFTFSTYYMTWVRQAPGQGLEWVSSISYTSGDIFYSDSVKGRFTISRDNAQNSLYLQMNSLGADDTAVYYCARGGAQFGPWVAGLGIHGYYHHYYYMDVWGQGTPVTVSS

SEQ ID NO: 28256 - protein, 113 aa, Homo sapiens
AASGFTFSTYYMTWVRQAPGQGLEWVSSISYTSGDIFYSDSVKGRFTISRDNAQNSLYLHMNSLGADDTAVYYCARGGAQFGPWVAGLGIHGYYHHYYYMDVWGQGTPVTVSS

SEQ ID NO: 28257 - protein, 113 aa, Homo sapiens
AASGFTFSTYYMTWVRQGPGQGLEWVSSISYTSGDIFYSDSVKGRFTISRDNAQNSLYLQMNSLGADDTAVYYCARGGAQFGPWVAGLGIHGYYHHYYYMDVWGQGTPVTVSS

SEQ ID NO: 28258 - protein, 113 aa, Homo sapiens
AASGFTFSTYYMTWVRQAPGQGLEWVSSISYTSGDISYSDSVKGRFTISRDNAQNSLYLQMNSLGADDTAVYYCARGGAQFGPWVAGLGIHGYYHHYYYMDVWGQGTPVTVSS

SEQ ID NO: 28259 - protein, 113 aa, Homo sapiens
VASGFTFTTYYMTWVRQAPGQGLEWVSSISYTSGDIFYSDSVKGRFTISRDNAQNSLYLQMNSLGVDDTAVYYCARGGAQFGPWVAGLGIHGYYHHYYYMDVWGQGTPITVSS

SEQ ID NO: 28260 - protein, 93 aa, Homo sapiens
AGSGFTFDNAWMSWVRQAPGKGLEWVARIKKRSDGGTTDYAAPVKGRFTISRDDSKNTLYLQMNSLKTEDTAVYYCTTDPYVWGKGTTVIVSS

SEQ ID NO: 28261 - protein, 93 aa, Homo sapiens
AGSGFTFSNAWMSWVRQAPGKGLEWVGRIKSNIDGGTTDYAAPVKGRFTISRDDSKNTLYLQMNSLKTEDTAVYYCTTDPYVWGKGTTVTVSS

SEQ ID NO: 28262 - protein, 93 aa, Homo sapiens
AASGFTFTNAWMSWVRQAPGKGLEWVGRIKSNIDGGTTDYAAPVKGRFTISRDDSKHTFYLQMNSLKTEDTAVYYCTTDPYVWGKGTTVTVSS

SEQ ID NO: 28263 - protein, 97 aa, Homo sapiens
AASGFTFSNYAMNWVRQAPGKGLEWVASIDSGSTYIFYADSVKGRFTISRDNAKNSLYLQMNSLRAEDTAVYYCARHHSSDGWFGPWGQGTLVTVSS

SEQ ID NO: 28264 - protein, 97 aa, Homo sapiens
AASGFSFSTYAMNWVRQAPGKGLEWVSSIDSSSSYIFYADSVKGRFTISRDNAKNSLYLQMNSLRGEDTAVYYCARHHSSDGWFGPWGQGTLVTVSS

SEQ ID NO: 28265 - protein, 97 aa, Homo sapiens
AASGFTFDNYAMNWVRQAPGKGLEWVASIDSGSTYIFYTNSVKGRFTISRDNAKNSLYLQMNSLRADDTAVYYCARHHSSDGWFGPWGQGTLVTVSS

SEQ ID NO: 28266 - protein, 93 aa, Homo sapiens
AVSGFSFSTNWMTWVRQAPGKGLEWVANINHDGTEKYYVDSVKGRFTISRDNAKNSLYLQMTSLSAEDTALYYCATYTGLGSWGQGTLVTVSS

SEQ ID NO: 28267 - protein, 93 aa, Homo sapiens
EVSGFSFSSNWMSWVRQAPGKGLEWVANIKHDGTEKYYVDSVKGRFTISRDNAKNSLYLQMTSLSAEDTALYYCATYTGLGSWGQGTLVTVSS

SEQ ID NO: 28268 - protein, 93 aa, Homo sapiens
AVSGFSFSSNWMSWVRQAPGKGLEWVANIKHDGTEKYYVDSVKGRFTISRDNAKNSLYLQMTSLSAEDTALYYCATYTGLGSWGQGTLVTVSS

SEQ ID NO: 28269 - protein, 93 aa, Homo sapiens
AVSGFNFDTNYMTWVRQAPGKGLEWVANINHDGTEKNYVDSVKGRFTISRDNAKDSLYLQMTSLSAEDTALYYCATYTGLGSWGQGTLVTVSS

SEQ ID NO: 28270 - protein, 100 aa, Homo sapiens
ASGFSVSDNFMSWVRQAPGKGLEWVSLIYSGGRTDYADSVKGRFTISRDNSKNTLYLQTNRLRVEDTAVYYCARVGSYYDSSEAEHFQNWGQGALVTVSS

SEQ ID NO: 28271 - protein, 100 aa, Homo sapiens
ASGFSVSYNFMSWVRQAPGTGLEWVSVIYSGGRTYYADSVKGRFTISRDNSKNTVYLQMNRLRVEDTAVYYCARVGSYYDSSEAEHFQNWGQGALVTVSS

SEQ ID NO: 28272 - protein, 100 aa, Homo sapiens
ASGFSVSNNYMSWVRQAPGKGLEWVSVIYSGGNTYYADSVKGRFTISRDSSKNTLYLQMNRLRVEDTAVYYCARVGSYYDSSEAEHFQNWGQGALVTVSS

SEQ ID NO: 28273 - protein, 100 aa, Homo sapiens
ASGFSVSNNFMSWVRQAPGKGLEWVSVIYSGGSTYYADSVKGRFTISRDNSKNTLYLQMNRLRVEDTAVYYCARVGSYYDSSEAEHFQNWGQGALVTVSS

SEQ ID NO: 28274 - protein, 95 aa, Homo sapiens
GTGFSFRTYSMNWVRQAPGKGLQWVASISDTSTYIYHAESVRGRFTISRNNADASVYLQMNSLRVEDTAIYYCARALLMGKFDSWGQGALVTVSS

SEQ ID NO: 28275 - protein, 95 aa, Homo sapiens
GTGFSFRTYSMNWVRQAPGKGLQWVASISDTSTYIYHADSVRGRFTISRNNADASVYLQMNSLRVEDTAIYYCARALLMGKFDSWGQGALVTVSS

SEQ ID NO: 28276 - protein, 93 aa, Homo sapiens
AVSGFTFSRYEMNWVRQAPGKGLEWVSYINVSESSTFYADSVKGRFTISRDNAKNSLYLQMNSLRPEDTAVYYCASGAQSDFWGQGTLVTVSS

SEQ ID NO: 28277 - protein, 93 aa, Homo sapiens
AVSGFTFSRYEMNWVRQAPGKGLEWVSYINVSESSTFYADSVKGRFTISRDNAKNSLYLQMNSLRPEDTAVYYYASGAQSDFWGQGTLVTVSS

SEQ ID NO: 28278 - protein, 93 aa, Homo sapiens
AVSGFTFSKYEMNWVRQAPGKGLEWVSYINVSETNTFYAGSVKGRFTISRDNAKNSLFLQMNSLRPEDTGVYYCASGAQSDFWGPGTLVTVSS

SEQ ID NO: 28279 - protein, 96 aa, Homo sapiens
AMSGFTFTSHWMAWVRQAPVTGLEWLANIKPDGTEKNHVASVRGRFTISRDNAKSSLYLQMNSLRDDDTAVYYCVRDVGGGYFDFWGQGTLVTVSS

SEQ ID NO: 28280 - protein, 96 aa, Homo sapiens
AMSGFTFTSHWMAWVRQAPVTGLEWLASIKPDGTEKNHVASVRGRFTISRDNAKSSLYLQMNSLRDDDTAVYYCVRDVGGGYFDFWGQGTLVTVSS

SEQ ID NO: 28281 - protein, 96 aa, Homo sapiens
AMSGFTFTSYWMAWVRQAPVTGLEWLANIKPDGTEKNHVASVRGRFTISRDNAKSSLYLQMNSLRDDDTAVYYCVRDVGGGYFDFWGQGTLVTVSS

SEQ ID NO: 28282 - protein, 99 aa, Homo sapiens
SVSGGSITDHYWNWIRQSPGKGLEWVGHIRKTESTHQNPSLNSRLTLSLDTSKNQISLKLSSVTAADTAVYYCGRSDTSGNSFVEFDYWGQGTLVTVSS

SEQ ID NO: 28283 - protein, 99 aa, Homo sapiens
SVSGGSITDHYWNWIRQSPGKGLEWVGHIRKTESTHQNPSLNGRLTLSLDTSKNQISLKLSSVTAADTAVYYCGRSDTSGNSFVEFDYWGQGTLVTVSS

SEQ ID NO: 28284 - protein, 99 aa, Homo sapiens
SVSGGSITDHYWNWIRQSPGKGLEWVGHIRVTESTHQNPSLNSRLTLSLDTSRNQISLKLSSVTAADTAVYYCGRSDTSGNSFVEFDYWGQGTLVTVSS

SEQ ID NO: 28285 - protein, 99 aa, Homo sapiens
SVSGGSITDHYWNWIRQSPGKGLEWVGHIRKTESTHQNPSLNGRLTLSLDTSKNQISLKLSSVTAADTAVYFCGRSDTSGNSFVEFDYWGQGTLVTVSS

SEQ ID NO: 28286 - protein, 99 aa, Homo sapiens
SVSGGSITDHYWNWIRQSPGKGLEWVGHIRMTENTHQNPSLNGRLTLSLDTSKNEISLKLRSVTAADTAVYYCGRSDTSGNSFVEFDYWGQGTLVTVSS

SEQ ID NO: 28287 - protein, 99 aa, Homo sapiens
SVSGGSITDHYWNWIRQSPGKGLEWVGHIRQTESTHQNPSLNSRLTLSLDTSKNQISLKLSSVTAADTAVYYCGRSDTSGNSFVEFDYWGQGTLVTVSS

SEQ ID NO: 28288 - protein, 99 aa, Homo sapiens
SVSGGSITDHYWNWIRQSPEKGLEWVGHIRKTESTHQNPSLNGRLTLSLDTSKNQISLKLSSVTAADTAVYYCGRSDTSGNSFVEFDYWGQGTLVTVSS

SEQ ID NO: 28289 - protein, 99 aa, Homo sapiens; identical to SEQ ID NO: 28287

SEQ ID NO: 28290 - protein, 99 aa, Homo sapiens; identical to SEQ ID NO: 28282

SEQ ID NO: 28291 - protein, 99 aa, Homo sapiens
SVSGGSITDHYWNWIRQSPGKGLEWVGHIRMTESTHQNPSLNSRLTLSLDTSKNQISLKLSSVTAADTAVYYCGRSDTSGNSFVEFDYWGQGTLVTVSS

SEQ ID NO: 28292 - protein, 99 aa, Homo sapiens; identical to SEQ ID NO: 28282

SEQ ID NO: 28293 - protein, 99 aa, Homo sapiens
SVSGGSITDHYWNWIRQSPGKGLEWVGHIRKTESTHQNPSLNSRLTLSLDTSKNQISLKLTSVTAADTAVYYCGRSDTSGNSFVEFDYWGQGTLVTVSS

SEQ ID NO: 28294 - protein, 99 aa, Homo sapiens
SVSGGSITDHYWNWIRQSPGKGLEWVGHIRKTETTHQNPSLNSRLTLSLDTSKNQISLKLTSVTAADTAVYYCGRSDTSGNSFVEFDYWGQGTLVTVSS

SEQ ID NO: 28295 - protein, 99 aa, Homo sapiens
SVSGGSITDHYWNWIRQSPGKGLEWVGHIRQTESTHQNPFLNSRLTLSLDTSKNQISLKLSSVTAADTAVYYCGRSDTSGNSFVEFDYWGQGTLVTVSS

SEQ ID NO: 28296 - protein, 99 aa, Homo sapiens
SVSGGSITDHYWNWIRQSPGKGLEWVGHIRVTESTHQNPSLNSRLTLSLDTSKNQISLKLSSVTAADTAVYYCGRSDTSGNSFVEFDYWGQGTLVTVSS

SEQ ID NO: 28297 - protein, 99 aa, Homo sapiens
SVSGGSITDHYWNWIRQSPGKGLEWVGHIRKTETTHQNPSLNSRLTLSLDTSKNQISLKLSSVTAADTAVYYCGRSDTSGNSFVEFDYWGQGILVTVSS

SEQ ID NO: 28298 - protein, 99 aa, Homo sapiens
SVSGGSITDHYWNWIRQSPGKGLEWVGHIRKTETTHQNPSLNSRLTLSLDTSKNQISLKLSSVTAADTGVYYCGRSDTSGNSFVEFDYWGQGILVTVSS

SEQ ID NO: 28299 - protein, 99 aa, Homo sapiens; identical to SEQ ID NO: 28282

SEQ ID NO: 28300 - protein, 99 aa, Homo sapiens
SVSGGSITDHYWNWIRQSPGKGLEWVGHIRKTESTHQNPSLNGRLTLSLDTSKNQISLKLTSVTAADTAVYYCGRSDTSGNSFVEFDYWGQGALVTVSS

SEQ ID NO: 28301 - protein, 99 aa, Homo sapiens
SVSGGSITDHYWNWIRQSPGKGLEWVGHIRVTESTHQNPSLNSRLTLSLDTSRNQISLKLYSVTAADTAVYYCGRSDTSGNSFVEFDYWGQGTLVTVSS

SEQ ID NO: 28302 - protein, 99 aa, Homo sapiens; identical to SEQ ID NO: 28282

SEQ ID NO: 28303 - protein, 99 aa, Homo sapiens; identical to SEQ ID NO: 28282

SEQ ID NO: 28304 - protein, 99 aa, Homo sapiens
SVSGGSISDHYWNWIRQSPGKGLEWVGHIRVTESTHQNPSLNSRLTLSLDTSRNQISLKLSSVTAADTAVYYCGRSDTSGNSFVEFDYWGQGTLVTVSS

SEQ ID NO: 28305 - protein, 99 aa, Homo sapiens; identical to SEQ ID NO: 28282

SEQ ID NO: 28306 - protein, 99 aa, Homo sapiens; identical to SEQ ID NO: 28298

SEQ ID NO: 28307 - protein, 95 aa, Homo sapiens
TVSGGSLSTYYWSWIRQPPGKTLEWIGYISYTGSTDYKSSLKSRVTVSRDTSKNQFSLILDSVTAADTAVYYCARFVSSRCYDYWGQGILVTVSS

SEQ ID NO: 28308 - protein, 95 aa, Homo sapiens
TVSGGSLSTYYWSWIRQPPGKTLEWIGYISYTGSADYKSSLKSRVTVSRDTSKNQFSLILDSVTAADTAVYYCARFVSSRCYDYWGQGILVTVSS

SEQ ID NO: 28309 - protein, 95 aa, Homo sapiens
TVSGGSLTTYYWSWIRQPPGKTLEWIGYISYTGSTDYKSSLKSRVTVSRDTSKNQFSLILDSVTAADTAVYYCARFVSSRCYDYWGQGILVTVSS

SEQ ID NO: 28310 - protein, 95 aa, Homo sapiens
TVSGGSLTTYYWSWIRQPPGKTLEWIGYISYTGVTDYKSSLRRRVTVSRDTSKNQFSLILDSVTAADTAVYYCARFVSSRCYDYWGQGILVTVSS

SEQ ID NO: 28311 - protein, 95 aa, Homo sapiens
TVSGGSLSTYYWSWIRQPPGKTLEWIGYISYTGSTDYKSSLKSRVTVSRDTAKNQFSLILDSVTAADTAVYYCARFVSSRCYDYWGQGILVTVSS

SEQ ID NO: 28312 - protein, 101 aa, Homo sapiens
AASGFTFSDYGMHWVRQAPGKGLEWVAVISYDGGNKYYEDSVKGRFTISRDNSKNTLYLQMNSLRAEDTAVYYCAKAPYRDGFGNYYLDYWGQGTLVIVSS

SEQ ID NO: 28313 - protein, 101 aa, Homo sapiens
AASGFTFSDYGMHWVRQAPGKGLEWVAVISYDGGNKYYADSVKGRFTISRDNSKNTLYLQMNSLRAEDTAVYYCAKAPYRDGFGNYYLDYWGQGTLVIVSS

SEQ ID NO: 28314 - protein, 101 aa, Homo sapiens
AASGFTFSSYGMHWVRQAPGKGLEWVAVISYDGTNKYYADSVKGRFTIARDNSKDTLYLQMNSLRAEDTAVYYCAKAPYRDGFGNYYLDYWGQGTLVIVSS

SEQ ID NO: 28315 - protein, 101 aa, Homo sapiens
AASGFSFSSYGIHWVRQAPGKGLEWVAVISYDGTNRYYADSVKGRFTIARDNSKNTLYLQMDSLRAEDTAVYYCAKAPYRDGFGNYYLDYWGQGTLVIVSS

SEQ ID NO: 28316 - protein, 101 aa, Homo sapiens
AASGFTFSSYGIHWVRQAPGKGLEWVAVISYDGTNKYYADSVKGRFTIARDNAKNTLYLQMNSLRAEDTAVYYCAKAPYRDGFGNYYLDYWGQGTLVIVSS

SEQ ID NO: 28317 - protein, 91 aa, Homo sapiens
AGSGFTFKNYWINWVRQAPGKGLEWVANINPDGSASYYVDSVKGRFTLSRDNAKNSVYLQMHTLRAEDTAVYYCSCAFTYWGLGTLVTVSS

SEQ ID NO: 28318 - protein, 91 aa, Homo sapiens
AGSGFTFKNYWINWVRQAPGKGLEWVANINPDGSASYYVDSVKGRFTLSRDNAKNSVYLQMHTLRDEDTAVYYCSCAFTYWGLGTLVTVSS

SEQ ID NO: 28319 - protein, 91 aa, Homo sapiens
ADSGFTFKNYWINWVRQAPGKGLEWVANINPDGSASYYVDSVKGRFTLSRDNAKNSVYLQMHTLRAEDTAVYYCSCAFTYWGLGTLVTVSS

SEQ ID NO: 28320 - protein, 90 aa, Homo sapiens
DSGFTFKNYWINWVRQAPGKGLEWVANINPDGSASYFVDSVKGRFTLSRDNAKNSVYLQMHSLRAEDTAVYYCSCAFTYWGLGTLVTVSS

SEQ ID NO: 28321 - protein, 104 aa, Homo sapiens
AASGFSFSSYGMSWVRQAPGKGLEWVSGISGSGGTTYYADSVKGRFTISRDNSKNTLYLQMNSLRAEDTAVYYCAKDGCSGGSCYGGFRAFDIWGQGTMVTVSS

SEQ ID NO: 28322 - protein, 104 aa, Homo sapiens
AASGFSFSSYGMSWVRQAPGKGLEWVSGISGSGATTYYADSVKGRFTISRDNSKNTLYMQMNSLRAEDTAVYYCAKDGCSGGSCYGGFRAFDIWGQGTMVTVSS

SEQ ID NO: 28323 - protein, 100 aa, Homo sapiens
AASGFTFETFKMNWVRQAPGKGLEWVSSISSTNNYINYADSVKGRFTISRDNAKNSLYLQMNSLRAEDTAVYYCVREHLSLTGYYMFDYWGQGTLVTVSS

SEQ ID NO: 28324 - protein, 100 aa, Homo sapiens
AASGFTFETYKMNWVRQAPGRGLEWVSSISNTNNYIHYADSVKGRFTISRDNAKNSLYLQMNSLRAEDTAVYYCVREHLSLTGYYMFDYWGQGTLVTVSS

SEQ ID NO: 28325 - protein, 98 aa, Homo sapiens
AGSGFNFNNYSMNWVRQAPGKGLEWVSYISSGSSAIYYTDSVRGRFSISRDNAKNSLYLQMNSLRDEDTAVYYCARGRKPGRGAFDIWGQGTMVTVSS

SEQ ID NO: 28326 - protein, 98 aa, Homo sapiens
AGSGFNFNNYSMNWVRQAPGKGLEWVSYISSGSVAIYYAGSVRGRFSIARDNAKNSLFLQMNSLRDEDTAVYYCARGRKPGRGAFDIWGQGTMVTVSS

SEQ ID NO: 28327 - protein, 103 aa, Homo sapiens
ISGDSVSNNNASWNWVRQSPSRGLEWLGRTYFRSKWYHDYAESVKSRITINPDTSKNQFSLQLNSVTPEDTAVYYCARDPEYDIGWHNWFDPWGQGTLVTVSS

SEQ ID NO: 28328 - protein, 103 aa, Homo sapiens
ISGDSVSSNNSAWNWVRQSPSRGLEWLGRTYYRSKWYHDYAISVKSRIIINPDTSKNQFSLQLNSVTPEDTAVYYCARDPEYDIGWHNWFDPWGQGTLVTVSS

SEQ ID NO: 28329 - protein, 101 aa, Homo sapiens
TVSGVSVRTSGYYLSWIRQPPGKGLEFIGHISNGGSTNYNPSLKSRVTISVDTSKNQLFLHLSSVTAADTAVYYCGRSDRSGTSFVEFDYWGQGTLVTVSS

SEQ ID NO: 28330 - protein, 101 aa, Homo sapiens
SVSGGSVSSGSYYWSWIRQPPGKGLEWIGHFPSRGNTNYNPSLKSRVTISVDTSNNQLSLHLSSVTAADTAVYYCGRSDRSGTSFVEFDYWGQGTLVTVSS

SEQ ID NO: 28331 - protein, 101 aa, Homo sapiens
TVSGGSVSSGSYYWSWIRQPPGKGLEWIGHFPSRGNTNYNPSLKSRVTISVDTSNNQLSLHLSSVTAADTAVYYCGRSDRSGTSFVEFDYWGQGTLVTVSS

SEQ ID NO: 28332 - protein, 101 aa, Homo sapiens
TVSGGSVSSGSYYWSWIRQPPGKGLEWIGHFPSRGNANYNPSLKSRVTISVDTSNNQLSLHLSSVTAADTAVYYCGRSDRSGTSFVEFDYWGQGTLVTVSS

SEQ ID NO: 28333 - protein, 100 aa, Homo sapiens
TVSGGSVTSGSYYWSWIRQPPGKGLEWIGHFPSRGNANYNPSLKSRVTISVDTSNNQLSLHLSSVTAADTAVYYCGRSDRSGTSFVEFDYWGQGTLITVS

SEQ ID NO: 28334 - protein, 101 aa, Homo sapiens
TVSGVSVRTSGYYLSWIRQPPGKGLEFIGHISNGGSTNYNPSLKSRVTISVDTSKNHLSLHLSSVTAADTAVYYCGRSDRSGTSFVEFDYWGQGTLVTVSS

SEQ ID NO: 28335 - protein, 101 aa, Homo sapiens
TVSGGSVRTSGYYLTWIRQPPGKGLEFIGHISYGGSTNYNPSLKSRVTISVDTSKNQLSLHLSSVTAADTAVYYCGRSDRSGTSFVEFDYWGQGTLVTVSS

SEQ ID NO: 28336 - protein, 101 aa, Homo sapiens
TVSGGSVSSGSYYWSWIRQPPGKGLEWIGHFPSRGNANYNPSLKSRVTISVDTSNNQLSLHLSSVNAADTAVYYCGRSDRSGTSFVEFDYWGQGTLVTVSS

SEQ ID NO: 28337 - protein, 101 aa, Homo sapiens
TVSGVSVRTSGCYLSWIRQPPGKGLEFIGHISYGGSTNYNPSLKSRVTISVDTSKNQLLLHLSSVTAADTAVYYCGRSDRSGTSFVEFDYWGQGTLVTVSS

SEQ ID NO: 28338 - protein, 101 aa, Homo sapiens
TVSGVSVRTSGYYLSWIRQPPGKGLEFIGHISNGGSTNYNPSLQSRVTISVDTSKNQLSLHLSSVTAADTAVYYCGRSDRSGTSFVEFDYWGQGTLVTVSS

SEQ ID NO: 28339 - protein, 101 aa, Homo sapiens; identical to SEQ ID NO: 28332

SEQ ID NO: 28340 - protein, 101 aa, Homo sapiens
TVSGVSVRTSGYYLSWIRQPPGKGLEFIGHISNGGNTNYNPSLKSRVTISVDTSKNQLFLHLSSVTAADTAVYYCGRSDRSGTSFVEFDYWGQGTLVTVSS

SEQ ID NO: 28341 - protein, 101 aa, Homo sapiens
TVSGGSVSSGSYYWSWIRQPPGKGLEWIGLFPSRGNTNYSPSLKSRVTISVDTSNNQLSLHLSSVTAADTAVYYCGRSDRSGTSFVEFDYWGQGTLVTVSS

SEQ ID NO: 28342 - protein, 101 aa, Homo sapiens; identical to SEQ ID NO: 28332

SEQ ID NO: 28343 - protein, 101 aa, Homo sapiens
TVSGVSVRSSGYYLSWIRQPPGKGLEFVGYISSGGSTTYNPSLKSRVTISVDTSKNQLSLHLTSVTAADTAVYYCGRSDRSGTSFVEFDYWGQGTLVTVSS

SEQ ID NO: 28344 - protein, 101 aa, Homo sapiens; identical to SEQ ID NO: 28329

SEQ ID NO: 28345 - protein, 101 aa, Homo sapiens
TVSGVSVRTSGYYLSWIRQPPGKGLEFIGHISYGGSTNYNPSLKSRVTISVDTSKNQLFLHLSSVTAADTAVYYCGRSDRSGTSFVEFDYWGQGTLVTVSS

SEQ ID NO: 28346 - protein, 101 aa, Homo sapiens
TVSGGSVRSSGYYLNWIRQPPGKGLEFIGHISYGGSTNYNPSLKSRVTISVDTSKNQLSLHLSSVTAADTAVYYCGRSDRSGTSFVEFDYWGQGTLVTVSS

SEQ ID NO: 28347 - protein, 101 aa, Homo sapiens
TVSGGSVRSSGYYWSWIRQPPGKGLEFIAYISSTGNTYYNPSLKGRVTISVDTSKNQLSLQLSSVTAADTAVYYCGRSDRSGTSFVEFDYWGQGTLVTVSS

SEQ ID NO: 28348 - protein, 101 aa, Homo sapiens
TVSGVSVRSSGYYLSWIRQPPGKGLQFIGHISNSGSTYYNPSLRSRVTMSVDTSKNQLSLHLTSVTAADTAVYYCGRSDRSGTSFVEFDYWGQGTLVTVSS

SEQ ID NO: 28349 - protein, 101 aa, Homo sapiens; identical to SEQ ID NO: 28332

SEQ ID NO: 28350 - protein, 101 aa, Homo sapiens
TVSGGSVRSSGYYLSWIRQPPGKGLEFIGHINSGGNTNYNPSLKSRVTISVDTSKNQLSLHLSSVTAADTAVYYCGRSDRSGTSFVEFDYWGQGTLVTVSS

SEQ ID NO: 28351 - protein, 101 aa, Homo sapiens
TVSGGSVSSGSYYWSWIRQPPGKGLEWIGHFPSRGNANYNPSLKSRVTISVDTSNSQLSLHLSSVTAADTAVYYCGRSDRSGTSFVEFDYWGQGTLVTVSS

SEQ ID NO: 28352 - protein, 101 aa, Homo sapiens
TVSGASVRTSGYYLNWIRQPPGKGLEFIGHISYGGSTNYNPSLKSRVTISVDTSKNQLSLHLSSVTAADTAVYYCGRSDRSGTSFVEFDYWGQGTLVTVSS

SEQ ID NO: 28353 - protein, 100 aa, Homo sapiens
TVSGGSVSSGSYYWSWIRQPPGKGLEWIGHFPSRGNANYNPSLKSRVTISVDTSNNQLSLHLSSVTAADTAVYYCGRSDRSGTSFVEFDYWGQGTLITVS

SEQ ID NO: 28354 - protein, 101 aa, Homo sapiens; identical to SEQ ID NO: 28343

SEQ ID NO: 28355 - protein, 101 aa, Homo sapiens
TVSGGSVSSGSYYWSWIRQPPGKGLEWVGHFPSRGNANYNPSLKSRVTISVDTSNNQLSLHLSSVTAADTAVYYCGRSDRSGTSFVEFDYWGQGTLVTVSS

SEQ ID NO: 28356 - protein, 100 aa, Homo sapiens
SGSGFTFSNNAMHWVRQAPGKGLEYVSGISNTGDTTHYADSVRGRFSVSRDNSKNALSLQMSSLRPEDTAIYYCVRGALFLGDSSASILWGQGTQVTVSS

SEQ ID NO: 28357 - protein, 100 aa, Homo sapiens
SGSGFTFSNNAMHWVRQAPGKGLEYVSGISNTGDTTHYADSVKGRFSVSRDNSKNALSLQMSSLRPEDTAIYYCVRGALFLGDSSASILWGQGTLVTVSS

SEQ ID NO: 28358 - protein, 103 aa, Homo sapiens
AASGFTFSDYGMHWVRQAPGKGLEWVAVIWYDGSIKYYANSVKGRFTISRDNSKNTLYLQMNSLRAEDTAVYYCARDRGTHSELVARYYFDNWGQGTLVTVSS

SEQ ID NO: 28359 - protein, 103 aa, Homo sapiens
GASGFTFSDYGMHWVRQAPGKGLEWVAVIWYDGSIKYYADSVKGRFTISRDNSKNTLYLQMNSLRAEDTAVYYCARDRGTHSELVARYYFDNWGQGTLVTVSS

SEQ ID NO: 28360 - protein, 103 aa, Homo sapiens; identical to SEQ ID NO: 28358

SEQ ID NO: 28361 - protein, 102 aa, Homo sapiens
ASGFTFSDYGMHWVRQAPGKGLEWVAVIWYDGSIKYYANSVKGRFTISRDNSKNTLYLQMNSLRAEDTAVYYCARDRGTHSELVARYYFDNWGQGTLVTVSS

SEQ ID NO: 28362 - protein, 103 aa, Homo sapiens
AASGFTFSDYGMHWVRQAPGKGLEWVAVIWFDGSIEYYANSVKGRFTISRDNSWNTLYLQMNNLRAEDTAVYYCARDRGTHSELVARYYFDNWGQGTLVTVSS

SEQ ID NO: 28363 - protein, 103 aa, Homo sapiens
AASGFTFSDYGMHWVRQAPGKGLEWVTVIWFDGSIKYYADSVKGRFTISRDNSRNTLYLQMNSLRAEDTAVYYCARDRGTHSELVARYYFDNWGQGTLVTVSS

SEQ ID NO: 28364 - protein, 98 aa, Homo sapiens
TVSTDSISSHYYNWIRQIPGKGLEWIAEIFHSGPTKNNPSLKSRLTTSVDTSKKQFFLKLSSVTAADTAVYFCAREIRIGGGMAFDYWGQGILVTVSS

SEQ ID NO: 28365 - protein, 98 aa, Homo sapiens
TVSTDSISTHFWNWIRQTPGKGLEWIGEIFHTGPTKYNPSLKSRVTTSVDTSKKQFYLKLNSVTAADTAVYYCAREIRIGGGMAFDYWGQGILVTVSS

SEQ ID NO: 28366 - protein, 98 aa, Homo sapiens
TVSTDSISSHYYNWIRQIPGKGLEWIAEIFHSGPTKNNPSLKSRLTTSVDTSKKQFFLKLSSVIAADTAVYFCAREIRIGGGMAFDYWGQGILVTVSS

SEQ ID NO: 28367 - protein, 101 aa, Homo sapiens
AASGFTFSSYEMNWVRQAPGKGLEWVSYISSGDSPIYYADSVKGRFTVSRDDAKNSLFLQMNSLRAEDTAVYYCAREGYCSSTSCDGFDPWGQGTLVTVSS

SEQ ID NO: 28368 - protein, 101 aa, Homo sapiens
AASGFTFSSYEMNWVRQAPGKGLEWVSYISSGDSPIYYADSVKGRFTVSRDNAKNSLFLQMNSLRAEDTAVYYCAREGYCSSTSCDGFDPWGQGTLVTVSS

SEQ ID NO: 28369 - protein, 101 aa, Homo sapiens
AASGFTFRSYEMNWVRQAPGKGLEWVSYISSGDSPIYYADSVKGRFTVSRDNAKNSLFLQMNSLRVEDTAVYYCAREGYCSSTSCDGFDPWGQGTLVTVSS

SEQ ID NO: 28370 - protein, 101 aa, Homo sapiens
AASGFTFSSYEMNWVRQAPGKGLEWVSYISSSDSPIYYADSVKGRFTISRDNAKNSLFLQMNSLRAEDTAVYYCAREGYCSSTSCDGFDPWGQGTLVTVSS

SEQ ID NO: 28371 - protein, 101 aa, Homo sapiens
AASGFTISSYEMNWVRQAPGKGLEWVSYISSGDSPIYYADSVKGRFTVSRDNAKNSLFLQMNSLRAEDTAVYYCAREGYCSSTSCDGFDPWGQGTLVTVSS

SEQ ID NO: 28372 - protein, 101 aa, Homo sapiens
AASGFTLSSYEMNWVRQAPGKGLEWVSYISSGDSPIYYADSVKGRFTVSRDNAKNSLFLQMNSLRAEDTAVYYCAREGYCSSTSCDGFDPWGQGTLVTVSS

SEQ ID NO: 28373 - protein, 99 aa, Homo sapiens
AASEFTFSNYAMHWVRQAPGKGLEWVAVISDDGSNKYYADSVKGRFTISRDNSKNTLYLQMNSLRLEDTAVYYCAKAPQSTQRGYFDYWGQGALVTVSS

SEQ ID NO: 28374 - protein, 99 aa, Homo sapiens
AASEFTFSSYGMHWVRQAPGKGLEWVAVISSDGSNKYYADSVRGRFTISRDNSKNTLYLQMNSLRVEDTAVYYCAKAPQSTQRGYFDYWGQGTLVTVSS

SEQ ID NO: 28375 - protein, 99 aa, Homo sapiens
AASEFTFRNYAMHWVRQAPGKGLEWVAVISDDGSNKYYADSVKGRFTISRDNSKNTLYLQMNSLRLEDTAVYYCAKAPQSTQRGYFDYWGQGALVTVSS

SEQ ID NO: 28376 - protein, 99 aa, Homo sapiens; identical to SEQ ID NO: 28375

SEQ ID NO: 28377 - protein, 99 aa, Homo sapiens
AASEFTFSSYGMHWVRQAPGKGLEWVAVISYDGSNKYYADSVKGRFTISRDNSKNTLSLQMNSLRVEDTAVYYCAKAPQSTQRGYFDYWGQGALVTVSS

SEQ ID NO: 28378 - protein, 99 aa, Homo sapiens
AASEFTLSSYGMHWVRQAPGKGLEWVAVISYDGSNKYYADSVKGRFTISRDNSKNTLSLQMNSLRVEDTAVYYCAKAPQSTQRGYFDYWGQGALVTVSS

SEQ ID NO: 28379 - protein, 100 aa, Homo sapiens
AASGFSFSSYWMSWVRQAPGKGLEWVANIKQDGSEKNYVDSVKGRLTISRDNAKKSLYLQMNSLRVEDTAVYYCARDPLVLGATGACDVWGQGTMVTVSS

SEQ ID NO: 28380 - protein, 100 aa, Homo sapiens; identical to SEQ ID NO: 28379

SEQ ID NO: 28381 - protein, 100 aa, Homo sapiens
AASGFSFSSYWMSWVRQAPGKGLEWVANIKEDGSEKNYVDSVKGRLTISRDNAKKSLYLQMNSLRVEDTAVYYCARDPLVLGATGACDVWGQGTMVTVSS

SEQ ID NO: 28382 - protein, 100 aa, Homo sapiens; identical to SEQ ID NO: 28379

SEQ ID NO: 28383 - protein, 100 aa, Homo sapiens; identical to SEQ ID NO: 28379

SEQ ID NO: 28384 - protein, 100 aa, Homo sapiens; identical to SEQ ID NO: 28379

SEQ ID NO: 28385 - protein, 95 aa, Homo sapiens
VSGVAPRTTSFYYSWIRQPPGKGLEWIGIIFRRGLTAYNPSLGDRVSISASRDRFTLSLTSVTAADTAVYYCARTHTNAWQLGSWGQGTLVTVSS

SEQ ID NO: 28386 - protein, 95 aa, Homo sapiens
VSGVAPRTTSFYYSWIRQPPGKGLEWIGIIFRRGLTAYNPSLGDRVSISASRDRFTLSLTSVTDADTAVYYCARTHTNAWQLGSWGQGTLVTVSS

SEQ ID NO: 28387 - protein, 99 aa, Homo sapiens
ISGDSVSRDTTTWNWIRQSPSRGLEWLGRTFYRSNWYNEYATSVKGRITINPDTSKNQFSLQLNSVTPDDTAVYFCARADTDGDRFDPWGQGTQVTVSS

SEQ ID NO: 28388 - protein, 99 aa, Homo sapiens
ISGDSVSSNSATWNWIRQSPSRGLEWLGRTFYRSKWFNEYAVSVRSRIIINPDTSKNQFSLQLKSVTPEDTAVYYCARADTDGDRFDPWGQGTLVTVSS

SEQ ID NO: 28389 - protein, 99 aa, Homo sapiens
ISGDSVSRDTTTWNWIRQSPSRGLEWLGRTFYRSNWYNEYATSVKGRITINPDTSKNQFSLQLNSVTPEDTAVYFCARADTDGDRFDPWGQGTLVTVSS

SEQ ID NO: 28390 - protein, 99 aa, Homo sapiens
ISGDSVSRNTATWNWIRQSPSRGLEWLGRTFYRSNWYNEYATSVKGRITINPDTSKNQFSLQMNSVTPEDTAVYYCARADTDGDRFDPWGQGTLVTVSS

SEQ ID NO: 28391 - protein, 93 aa, Homo sapiens
AVYGGPFSGYWWSWFRQPPGKGLEWIGEINDRGSTNYNPSLKSRVTISIDRSKNQYSLKLSSVTAADTAVYYCARKSVADDYWGPGTLVTVSS

SEQ ID NO: 28392 - protein, 93 aa, Homo sapiens
AVYGGPFSGYWWSWFRQPPGKGLEWIGEINDRGSTNYHPSLKSRVTISIDRSKNQYSLKLSSVTAADTAVYFCARKSVADDYWGPGTLVTVSS

SEQ ID NO: 28393 - protein, 93 aa, Homo sapiens
AVYGGPFSGYWWSWFRQPPGKGLEWIGEINDRGSTNYNPSLKSRVTISIDRSKNQYSLKVSSVTAADTAVYYCARKSVADDYWGPGTLVTVSS

SEQ ID NO: 28394 - protein, 93 aa, Homo sapiens; identical to SEQ ID NO: 28391

SEQ ID NO: 28395 - protein, 93 aa, Homo sapiens; identical to SEQ ID NO: 28391

SEQ ID NO: 28396 - protein, 99 aa, Homo sapiens
AASGFAFKTYEMNWVRQTPANGLEWIAYIGASGAYIKYADSVKGRFTISRDDAKNSLFLQMNSLRAEDTGVYYCATAGGNWYLGLLVYWGQGTVVTVSS

SEQ ID NO: 28397 - protein, 99 aa, Homo sapiens; identical to SEQ ID NO: 28396

SEQ ID NO: 28398 - protein, 99 aa, Homo sapiens
AASGFIFNTYEMNWVRQTPGNGLEWISYIGASGAFIKYADSVKGRFTISRDDAKNSLYLQMNGLRAEDSGVYYCATAGGNWYLGLLVYWGQGTQVTVSS

SEQ ID NO: 28399 - protein, 101 aa, Homo sapiens
AASGFIFSDYVMHWIRRAPGKGLEWVALTAHDGSNKYYADSVKGRFTISRDNSKSTVYLQMNSLRAEDTAVYFCAKGTSGYYDGSGHIDIWGQGTEVIVSS

SEQ ID NO: 28400 - protein, 101 aa, Homo sapiens
AASGFTFSDYVMHWIRRAPGKGLEWVALTAHDGSNKYYADSVKGRFTISRDNSKSTVYLQMNSLRAEDTAVYFCAKGTSGYYDGSGHIDIWGQGTMVIVSS

SEQ ID NO: 28401 - protein, 99 aa, Homo sapiens
KGSGFSFTSHWIAWVRQMPGKGLEWMGTIYPGDSETRYSPSFQGRVTFSADKSITTAYLHWTTLQASDTAVYYCAKNRHTSRDFYFDLWGRGTLVTVAS

SEQ ID NO: 28402 - protein, 99 aa, Homo sapiens
KGSGFSFTSHWIAWVRQMPGKGLEWMGTIYPADSETRYSPSFQGQVTFSADKSTTTAYLHWTTLKASDTAIYYCAKNRHTSRDFYFDLWGRGTLVTVAS

SEQ ID NO: 28403 - protein, 99 aa, Homo sapiens
KGSGFSFTSHWIAWVRQMPGKGLEWMGTIYPGDSETRYSPSFEGRVTFSADKSTTTAYLHWTTLQASDTAVYYCAKNRHTSRDFYFDLWGRGTLVTVAS

SEQ ID NO: 28404 - protein, 96 aa, Homo sapiens
AASGFTFTTSYMSWLRQAPGKGLEWVAYVSPDGSVKVYVDSVKGRFSISRDNTKHSLYLQMDSLRVEDTAVYFCVRDPWYGAVDYWGQGSLVTVSS

SEQ ID NO: 28405 - protein, 96 aa, Homo sapiens
AASGFTFTTSYMSWVRQAPEKGLEWVAYVSPDGGVKVYVDAVKGRFSISRDNTKHSVYLQMDSLRVEDTAVYFCVRDPWYGAVDYWGQGILVTVSS

SEQ ID NO: 28406 - protein, 96 aa, Homo sapiens
AASGFSFSTSYMSWVRQAAGKGLEWVAYVSPDGSVKVYVDSVKGRFSISRDNTKHSLYLQMDSLRVEDTALYFCVRDPWYGAVDYWGQGSLVTVSS

SEQ ID NO: 28407 - protein, 96 aa, Homo sapiens
AASGFTFTTSYMSWLRQAPGKGLEWVAYVSPDGSVKVYVDSVKGRFSISRDNSKHSVYLQMDSLRVEDTAVYFCVRDPWYGAVDYWGQGSLVTVSS

SEQ ID NO: 28408 - protein, 99 aa, Homo sapiens
AASGFTFSGYEFNWVRQAPGKGLEWVSYISSSGDNIHYADSVKGRFTISRDNAKNSLYLQMNSLRVEDTALYYCAREKSGCGGDCSDYWGQGSLVTVSS

SEQ ID NO: 28409 - protein, 99 aa, Homo sapiens
AASGFTFSGYEFNWVRQAPGKGLEWVSYISSSGDNIQYADSVKGRFTISRDNAKNSLYLQMNSLRVEDTALYYCAREKSGCGGDCSDYWGQGSLVTVSS

SEQ ID NO: 28410 - protein, 98 aa, Homo sapiens
TVSSGPIGISSCYWGWIRQPPGKGPEWIGSIYYNGDTYYPPSLKSRLSMSVDTSKNQFSLKLTSVTAADTALYYCARHPRSGFYWDFWGQGILVAVSS

SEQ ID NO: 28411 - protein, 97 aa, Homo sapiens
VSGGPIGTSSCYWGWIRQPPGKGPEWIGSVYYNGDTYYTPSLRSRVTMSIDTSNNRFSLRLTSVTAADTAQYYCARHPRSGFYWDFWGQGALVAVSS

SEQ ID NO: 28412 - protein, 98 aa, Homo sapiens
TVSGGPIGSSSCYWGWIRQPPGKGPEWLGSIYYNGDTYYTPSLKSRLTMSVDTSRNQFSLKVTSVTAADTALYYCARHPRSGFYWDFWGQGILVAVSS

SEQ ID NO: 28413 - protein, 97 aa, Homo sapiens
VSGGPIGSSSCYWGWIRQPPGKGPEWIGSIYYNGDTYYTPSLKSRVTMSVDTSNNRFSLRLTSVTAADTAQYYCARHPRSGFYWDFWGQGPLVAVSS

SEQ ID NO: 28414 - protein, 98 aa, Homo sapiens
TVSGGPIGSSSCYWGWIRQPPGKGPEWIGSIYYNGDTYYTPSLKSRLTMSVDTSKNQFSLKLTSVTAADTAQYYCARHPRSGFYWDFWGQGTLVAVSS

SEQ ID NO: 28415 - protein, 98 aa, Homo sapiens
TVSSGPIGISSCYWGWIRQPPGKGPEWIGSIYYNGDTYCPPSLKSRLTMSVDTSKNQFSLKLTSVTAADTALYYCARHPRSGFYWDFWGQGILVAVSS

SEQ ID NO: 28416 - protein, 99 aa, Homo sapiens
KGSGYSFTNYWIGWVRQVPGKGLEWVAIIFPGDSDTAYNPSFQGQVTISADKSISTAYLQWSSLKASDTAMYYCARRLRYNSGGYFDLWGRGTLVTVSS

SEQ ID NO: 28417 - protein, 99 aa, Homo sapiens
KGSGYSFTNYWIGWVRQMPGKGLEWMGIIFPADSDTTYNPSFQGQVTISADKSISTAYLQWNSLKASDTAMYYCARRLRYNSGGYFDLWGRGTLVTVSS

SEQ ID NO: 28418 - protein, 98 aa, Homo sapiens
GSGYSFANYWIGWVRQVPGKGLEWMGIIFPADSDTTYNPSFQGQVTISADKSINTAYLQWNSLKASDTAMYYCARRLRYNSGGYFDLWGRGTLVTVSS

SEQ ID NO: 28419 - protein, 95 aa, Homo sapiens
AGAGFVFSNFVMKWVRQAPGKGLEWVSTAHVNADWTQYADSVKGRFTISRDNSKNTLYLHMNSLRAEDTAVYYCAKDISWAMDVWGKGTTVTVSS

SEQ ID NO: 28420 - protein, 95 aa, Homo sapiens
AGAGFTFSNYVMKWVRQAPGKGLEWVSTAHGNGDLTQYADSVKGRFTISRDNSKNTLYLQMNSLRAEDTAVYYCAKDISWAMDVWGKGTTVTVSS

SEQ ID NO: 28421 - protein, 95 aa, Homo sapiens; identical to SEQ ID NO: 28420

SEQ ID NO: 28422 - protein, 95 aa, Homo sapiens
AGAGFIFSNYAMKWVRQAPGKGLEWVSTAHGNGVLTQYADSVKGRFTISRDNSKNTLYLQMNSLRAEDTAVYYCAKDISWAMDVWGKGTTVTVSS

SEQ ID NO: 28423 - protein, 96 aa, Homo sapiens
AASGFTFTNYWMTWVRQAPGKGLEWVGNIKEDGSEKYYVDSVKGRFTISRDDPKNSLYLQMNFLGVVDTAVYYCARGGRTGALDIWGQGTLVTVSS

SEQ ID NO: 28424 - protein, 96 aa, Homo sapiens
GASGFTLSTYWMTWVRQAPGKGQEWVANIKEDGSDKFYADSVKGRFTISRDDPKNSLYLQMNFLGVQDTAVYYCARGGRTGALDIWGQGTMVTVSS

SEQ ID NO: 28425 - protein, 95 aa, Homo sapiens
VASGFTFSNYWMTWVRQAPGKGLEWVANIKGDGSEKYYGDSVKGRFTISRDDPNKSLYLEMTFLGVVDTAVYYCARGGRTGALDIWGHGTLVTVS

SEQ ID NO: 28426 - protein, 96 aa, Homo sapiens; identical to SEQ ID NO: 28424

SEQ ID NO: 28427 - protein, 96 aa, Homo sapiens
AASGFTLTNYWMTWVRQAPGKGLEWVGNIKEDGSEKYYVDSVKGRFTISRDDPKNSLYLQMNFLGVVDTAVYYCARGGRTGALDIWGQGTLVTVSS

SEQ ID NO: 28428 - protein, 96 aa, Homo sapiens
AASGFTFTSYWMTWVRQAPGKGLEWVGNIREDGSEKHYVDSVKGRFTISRDDPKNSLYLQMNFLGAVDTAVYYCARGGRTGALDIWGQGTLVTVSS

SEQ ID NO: 28429 - protein, 96 aa, Homo sapiens
AASGFTFTTYWMTWVRQAPGKGLEWVGNIKEDGSEVYYADSVKGRFTISRDDPKNSLYLQMNFLGVVDTAVYYCARGGRTGALDIWGQGTLVTVSS

SEQ ID NO: 28430 - protein, 95 aa, Homo sapiens
VASGFTFSNYWMTWVRQAPGKGLEWVANIKGDGSEKYYGNSVKGRFTISRDDPNKSLYLEMTFLGVVDTAVYYCARGGRTGALDIWGHGTLVTVS

SEQ ID NO: 28431 - protein, 96 aa, Homo sapiens; identical to SEQ ID NO: 28427

SEQ ID NO: 28432 - protein, 96 aa, Homo sapiens
AASGFTLTNYWMTWVRQAPGKGLEWVGNIKEDGSEKYHVDSVKGRFTISRDDPKNSLYLQMNFLGVVDTAVYYCARGGRTGALDIWGQGTLVTVSS

SEQ ID NO: 28433 - protein, 95 aa, Homo sapiens
AASGFTFSTYWMTWVRQAPGKGLEWVANIKEDGSEKYYVDSVKGRFTISRDDPKNSLYLQMNFLGVVDTAVYYCARGGRTGALDIWGQGTLVTVS

SEQ ID NO: 28434 - protein, 95 aa, Homo sapiens
VASGFTFSNYWMTWVRQAPGKGLEWVANIKGEGSEKYYGDSVKGRFTISRDDPNKSLYLEMTFLGVVDTAVYYCARGGRTGALDIWGHGTLVTVS

SEQ ID NO: 28435 - protein, 95 aa, Homo sapiens
GASGFTLSTYWMTWVRQAPGKGQEWVANIKEDGSDKFYADSVKGRFTISRDDPKNSLYLQMNFLGVQDTAVYYCARGGRTGALDIWGQGTMVTVS

SEQ ID NO: 28436 - protein, 99 aa, Homo sapiens
TVSGASISRDFWSWIRQPPGKGLEWIGYIYHSGGTNYNPSLKSRVTISVDTSKSQFSLKVSSVTAADTAVYYCARGTGSNGEVAWFDPWGQGTLVTVSS

SEQ ID NO: 28437 - protein, 99 aa, Homo sapiens
TVSGASISRDFWSWIRQPPGKGLEWIGYIYHSGGTNYNPSLKSRVTISVDTSKSQFSLKVTSVTAADTAVYFCARGTGSNGEVAWFDPWGQGTLVTVPS

SEQ ID NO: 28438 - protein, 98 aa, Homo sapiens
VSGASLSRDFWSWIRQTPGKGLEWIGYIYHSGGTNYNPSLKSRVTISVDTSKSQFSLKVTSMTAADTAVYYCARGTGSNGEVAWFDPWGQGILVTVPS

SEQ ID NO: 28439 - protein, 99 aa, Homo sapiens
SVSGASIRRDFWSWVRQPPGRGLEWIGYIYHLGGTNYNPSLESRVTISVDTSKSQFSLRVRSVTAADTAVYYCARGTGSNGEVAWFDPWGQGTLVTVSS

SEQ ID NO: 28440 - protein, 98 aa, Homo sapiens
VSGGSITSMNFYWGWIRQSPGKGLEWIATMYYSGNTYYNPSLKSRVTISGDTPRNRVSLQLTSVTAADTGVYYCARSIWTVEAATWREWGPGMLVTVS

SEQ ID NO: 28441 - protein, 98 aa, Homo sapiens
VSGGSITSMNFYWGWIRQSPGKGLEWIATMYYSGKTYYNPSLKSRVTISGDTPRNRVSLQLTSVTAADTGVYYCARSIWTVEAATWREWGPGMLVTVS

SEQ ID NO: 28442 - protein, 98 aa, Homo sapiens
VSGGSITSMNFYWGWIRQSPGKGLEWIATMYYSGKTYYNPSLKSRVTISGDTPRNRVSLQLTSVTAADTGMYYCARSIWTVEAATWREWGPGMLVTVS

SEQ ID NO: 28443 - protein, 86 aa, Homo sapiens
VSGGSIDNCNWVRQPPGKGLEWIGNINFRGTTNYSPSLKSRVSISVDTSKNQIALKLNSVTAADTAVYYCMSWGYWGQGILVTVSS

SEQ ID NO: 28444 - protein, 89 aa, Homo sapiens
TVSAGSIGRSMLNWVRQPPGKGLEWIGNINYRGTTNYSPSLKSRVTISEDTSKNQFALTLNSVTAADTAVYYCMSWGYWGQGILVTVSS

SEQ ID NO: 28445 - protein, 105 aa, Homo sapiens
TASGGSITDNYFFWVWIRQSPGQGLEWIGSLEYGGSTYYNPSLQNRVTIGVDASKNQFSLKLNSVTAPDTAVYYCARSLGDYSKSGAHYWYFPLWGRGTPVTVSS

SEQ ID NO: 28446 - protein, 105 aa, Homo sapiens
TASGGSITNNSFFWVWIRQPPGQGLEWIGSLYYGGSTYYNPSLKSRVTIGVDTSKNQFSLKLSSVTAPDTAVYYCARSLGDYSKSGAHYWYFPLWGRGTPVTVSS

SEQ ID NO: 28447 - protein, 101 aa, Homo sapiens
TVSGGSVSNTNYFWSWIRQPPGKGLEYIGYIHYSGRSNYHPSLNSRVTMSVDTSKNHLSLQLSSVTAADTAVYYCGRSDRSGPSFVEFDYCGQGILVTVSS

SEQ ID NO: 28448 - protein, 101 aa, Homo sapiens
TVSGGSVSTANYFWSWIRQPPGKGLEYIGYIHYSGRSNYHPSLKSRVTMSVDTSKNHLSLQLSSVTAADTAVYYCGRSDRSGPSFVEFDYCGQGILVTVSS

SEQ ID NO: 28449 - protein, 101 aa, Homo sapiens
TVSGGSVSNSNSYWSWIRQPPGKGLEWIAYIRYNGRSDYHPSLKSRATVSVDTSKNHFSLQLSSVTAADTAVYYCGRSDRSGPSFVEFDYCGQGILVTVSS

SEQ ID NO: 28450 - protein, 101 aa, Homo sapiens
TVSGGSVSSANNYWSWIRQPPGKGLEWIAYIHYNGRSDYHPSLRSRVTVSVDTSKNHVSLQLSSVTAADTAVYYCGRSDRSGPSFVEFDYFGQGILVTVSS

SEQ ID NO: 28451 - protein, 101 aa, Homo sapiens
TVSGGSVSSANNYWSWIRQPPGKGLEWIAYIHYNGRSDYHPSLKSRVTVSVDTSKNHVSLQLSSVTTADTAVYYCGRSDRSGPSFVEFDYFGQGILVTVSS

SEQ ID NO: 28452 - protein, 101 aa, Homo sapiens
TVSGGSVSSANNYWSWIRQPPGKGLEWIAYIHYNGRSDYHPSLKSRVTVYVDTSKNHVSLQLSSVTAADTAVYYCGRSDRSGPSFVEFDYFGQGILVTVSS

SEQ ID NO: 28453 - protein, 101 aa, Homo sapiens
TVSGGSVSNTNYFWSWIRQPPGKGLEYIGYIHYSGRSNYHPSLNSRVTISVDTAKNHLSLQLSSVTAADTAVYYCGRSDRSGPSFVEFDYCGQGILVTVSS

SEQ ID NO: 28454 - protein, 101 aa, Homo sapiens
IVSGGSVSSANNYWSWIRQPPGKGLEWIAYIHYNGRSDYHPSLKSRVTVSVDTSKNHVSLQLSSVTAADTAVYYCGRSDRSGPSFVEFDYFGQGILVTVSS

SEQ ID NO: 28455 - protein, 101 aa, Homo sapiens
TVSGGSVSSANNYWSWIRQPPGKGLEWIAYIHYNGRSDYHPSLKSRVTVSVDTSKNHLSLQLSSVTAADTAVYYCGRSDRSGPSFVEFDYCGQGILVTVSS

SEQ ID NO: 28456 - protein, 101 aa, Homo sapiens
TVSGGSVSTANYFWSWIRQPPGKGLEYIGYIHYSGRSNYHPSLKSRVTISVDTSKNHLSLQLSSVTAADTAVYYCGRSDRSGPSFVEFDYCGQGIMVTVSS

SEQ ID NO: 28457 - protein, 101 aa, Homo sapiens
TVSGGSVSNTNYFWSWIRQPPGKGLEYIGYVHYSGRSNYHPSLNSRVTISVDTSKNHLSLHLSSVTAADTAVYYCGRSDRSGPSFVEFDYSGQGILVTVSS

SEQ ID NO: 28458 - protein, 101 aa, Homo sapiens; identical to SEQ ID NO: 28447

SEQ ID NO: 28459 - protein, 101 aa, Homo sapiens
TVSGVSVRSSFYYLSWIRQPPGKGLEFIGHISYGGSTNYNPSLRSRVTISLDVSKNQVSLHLSSVTVADSAVYYCGRSDRSGPSFVEFDYWGQGTLVTVSS

SEQ ID NO: 28460 - protein, 101 aa, Homo sapiens
TVSGGSVSSANYFWSWIRQPPGKGLEYIGYIHYSGRSNYHPSLKSRVTMSVDTSKNHLSLQLSSVTAADTAVYYCGRSDRSGPSFVEFDYCGQGIMVTVSS

SEQ ID NO: 28461 - protein, 101 aa, Homo sapiens
TVSGGSVSSANNYWSWIRQPPGKGLEWIAYIHYNGRSDYHPSLKSRVTVSVDTSKNHVSLQLSSVTAADTAVYYCGRSDRSGPSFVEFDYFGQGILVTVSS

SEQ ID NO: 28462 - protein, 101 aa, Homo sapiens
TVSGGSVSSSNYFWSWIRQPPGKGLEYIGYIHYTGRSNYHPSLKSRVTMSVDTSKNHLSLQLSSVTAADTAVYYCGRSDRSGPSFVEFDYCGQGILVTVSS

SEQ ID NO: 28463 - protein, 101 aa, Homo sapiens; identical to SEQ ID NO: 28461

SEQ ID NO: 28464 - protein, 101 aa, Homo sapiens
TVSGGSVSNSNSYWSWIRQPPGKGLEWIAYIHYNGRSDYHPSLKSRATISVDTSKNQFSLQLSSVTAADTAVYYCGRSDRSGPSFVEFDYCGQGILVTVSS

SEQ ID NO: 28465 - protein, 101 aa, Homo sapiens
TVSGGSVSSANYFWSWIRQPPGKGLEWIGYIHYSGRSNYRPSLQSRVTMSVDTSKNHVSLQLSSVTAADTAVYYCGRSDRSGPSFVEFDYCGQGILVTVSS

SEQ ID NO: 28466 - protein, 101 aa, Homo sapiens
TVSGGSVSNANNYWSWIRQPPGKGLEWIAYIHYNGRSDSHPSLKSRVTVSVDTSKNHVSLQLSSVTAADTAVYYCGRSDRSGPSFVEFDYFGQGILVTVSS

SEQ ID NO: 28467 - protein, 101 aa, Homo sapiens
TVSGGSVSNSNSYWSWIRQPPGKGLEWIAYIHYNGRSDYHPSLKSRATVSVDTSKNHFSLQLSSVTAADTAVYYCGRSDRSGPSFVEFDYCGQGILVTVSS

SEQ ID NO: 28468 - protein, 101 aa, Homo sapiens
TVSGGSVSTSNYFWSWIRQPPGKGLEYIGYIHYTGRSNYHPSLKSRVTMSVDTSKNHLSLQLSSVTAADTAVYYCGRSDRSGPSFVEFDYCGQGILVTVSS

SEQ ID NO: 28469 - protein, 101 aa, Homo sapiens
TVSGGSVSNTNNYWSWIRQPPGKGLEWIAYIHYNGRSDYHPSLKSRVTVSMDTSKNQFSLQLSSVTAADTAVYYCGRSDRSGPSFVEFDYCGQGILVTVSS

SEQ ID NO: 28470 - protein, 101 aa, Homo sapiens; identical to SEQ ID NO: 28448

SEQ ID NO: 28471 - protein, 101 aa, Homo sapiens
TVSGGSVNNANNYWSWIRQPPGKGLEWIAYVHSNGRSDYHPSLKSRVTVSVDTSKNHVSLQLTSVTAADTAVYFCGRSDRSGPSFVEFDYFGQGILVTVSS

SEQ ID NO: 28472 - protein, 101 aa, Homo sapiens
TVSGGSVSSTNNYWSWIRQPPGKGLEWIAYIHYNGRSDYHPSLKSRVTVSVDTSKNHVSLQLSSVTAADTAVYYCGRSDRSGPSFVEFDYFGQGILVTVSS

SEQ ID NO: 28473 - protein, 101 aa, Homo sapiens; identical to SEQ ID NO: 28461

SEQ ID NO: 28474 - protein, 103 aa, Homo sapiens
VSGGSISSSGYYWGWIRQPPGKGLEWIGNIYYSGSTYYNPSLKSRVTISVDTSKNQFSLRLTSVIAADTAVYYCARVHCSRSSCYFPAWFDPWGQGNQVTVSS

SEQ ID NO: 28475 - protein, 103 aa, Homo sapiens
VSGGSISSSGYYWGWIRQPPGKGLEWIGYIYYSGSTYYNPSLKSRVTISADTSKNQLSLKLTSVIAADTAVYYCARVHCSRSSCYFPAWFDPWGQGNQVTVSS

SEQ ID NO: 28476 - protein, 103 aa, Homo sapiens
VSGGSISSSGYYWGWIRQPPGKGLEWIGSIYYSGSTYYNPSLKSRVAMSIETSKNQLSLKLTSVIAADTAVYYCARVHCSRSSCYFPAWFDPWGQGNQVTVSS

SEQ ID NO: 28477 - protein, 98 aa, Homo sapiens
TVSGGSMNNYFWSWVRKTPGKGLEWIGYVSVSGSTNYNPSLRGRVTMSVDTSKNQFSLSLTSVTAADTGLYLCSRNPPDIALGYMDAWGKGTTVTVSS

SEQ ID NO: 28478 - protein, 98 aa, Homo sapiens
TVSGGSMNNYFWSWVRQTPGKGLEWIGYVSFSGSTNYNPSLRGRVTMSVDTSKNQFSLSLTSVTAADTGLYLCSRNPPDIALGYMDAWGKGTTVTVSS

SEQ ID NO: 28479 - protein, 99 aa, Homo sapiens
AASGFTFSGSAMHWVRQASGKGLEWVGRIRSKTNSYATAYAASMKGRFTISRDDSKNTAYLQMNSLKTEDTAVYYCTRHEDYGDPFDYWGQGTLVTVSS

SEQ ID NO: 28480 - protein, 99 aa, Homo sapiens
AASGFTFSGSAMHWVRQASGKGLEWVGRIRSKTNSYATAYAASMKGRFTISRDDSKNTAFLQMNSLKTEDTAVYYCTRHEDYGDPFDYWGQGTLVTVSS

SEQ ID NO: 28481 - protein, 96 aa, Homo sapiens
ASASSFNANYMQWVRQAPGQGLEWMAMINRIDGSTYYAQTFKGRVTMTRDTSTRTVYMELSSLTSDDTAVYYCATGSGATWYAQYWGQGTLVTVSS

SEQ ID NO: 28482 - protein, 95 aa, Homo sapiens
SASSFNANCMQWVRQAPGQGLEWMAMLNRLDGSTYYAQTFKGRVTMTRDTSTRTVYMELSSLTSDDTAVYYCATGSGATWYAQYWGQGTLVTVSS

SEQ ID NO: 28483 - protein, 101 aa, Homo sapiens
AASGFTLSHHEINWVRQVPGKGLEWLSFADGSAGTIYYRDSVRGRFIISRDNANNSVFLQLNSLRVEDTAVYYCVRGPGGGEMGTITFDFWGQGTLVTVSS

SEQ ID NO: 28484 - protein, 101 aa, Homo sapiens; identical to SEQ ID NO: 28483

SEQ ID NO: 28485 - protein, 101 aa, Homo sapiens; identical to SEQ ID NO: 28483

SEQ ID NO: 28486 - protein, 103 aa, Homo sapiens
AASGFTFTTYSFNWVRQAPGKGLEWVSSISSSSRHIYYADSVKGRFTISRDNAKNSLYLQMNILRAEDTAVYYCARDGTQFYDSTGLYYMDVWGKGTTVTVSS

SEQ ID NO: 28487 - protein, 103 aa, Homo sapiens
AASGFPFTTYSFNWVRQAPGKGLEWVSSISSSSRHIYYADSVKGRFTISRDNAKNSLYLQMNNLRAEDTAVYYCARDGTQFYDSTGLYYMDVWGNGTTVTVSS

SEQ ID NO: 28488 - protein, 99 aa, Homo sapiens
AVSGFSISSYWMSWLRQAPGKGLEWLGNIKQDGSETYYLDSVKGRFTISRNNAKNSLYVQLNSLRVEDTAVYYCARDREYSGSHPIDYWGQGTLVTVSS

SEQ ID NO: 28489 - protein, 99 aa, Homo sapiens
AVSGFSISSYWMTWVRQAPGKGLEWLGNIKQDGSETYYLDSVKGRFTISRNNAKNSLYVQLNSLRVEDTAVYYCARDREYSGSHPIDYWGQGTLVTVSS

SEQ ID NO: 28490 - protein, 99 aa, Homo sapiens
AASGFSFSSYWMSWLRQAPGKGLEWLANIKQDGSETYYVDSVKGRFTISRDNAKNSLYVQLNSLRVEDTAVYYCARDREYSGSHPIDYWGRGTLVTVSS

SEQ ID NO: 28491 - protein, 99 aa, Homo sapiens
AASGFSISSYWMSWVRQAPGKGLEWLANIKQDGSETYYLDSVRGRFTISRNNAKNSLYVQLNSLRVEDTAVYYCARDREYSGSHPIDYWGQGTLVTVSS

SEQ ID NO: 28492 - protein, 103 aa, Homo sapiens
YGGSFSIYYWNWIRQPPGKGLEWIGEIDRSGGASYTPSLRGRVSISLDSSNNQFSLRLTSVTAADTAVYYCARATYVPDSSGYDYYYYYMDVWGKGTTVTVSS

SEQ ID NO: 28493 - protein, 103 aa, Homo sapiens; identical to SEQ ID NO: 28492

SEQ ID NO: 28494 - protein, 103 aa, Homo sapiens
YGGSFSTYYWNWIRQPPGKGLEWIGEINRSGGASYTPSLRGRVTVSLDSSKNQFSLKLTSVTAADTAVYYCARATYVPDSSGYDYYYYYMDVWGKGTTVTVSS

SEQ ID NO: 28495 - protein, 103 aa, Homo sapiens
YDGSFTTYYWNWIRQPPGKGLEWIGEINRSGGASYTPSLRGRVTVSFDSSKNQFSLKLTSVTVADTAVYYCARATYVPDSSGYDYYYYYMDVWGKGTTVTVSS

SEQ ID NO: 28496 - protein, 106 aa, Homo sapiens
AVYGGSFSGYYWSWIRQPPGKGLEWIGEINHGGGTNYNPSLKSRVAISLATSKNQFSLKLNSVTAADTAVYYCARGGYHSSRRHPPRKRDYYMDVWGTGTTVTVSS

SEQ ID NO: 28497 - protein, 106 aa, Homo sapiens; identical to SEQ ID NO: 28496

SEQ ID NO: 28498 - protein, 91 aa, Homo sapiens
AASGFTFSGYDMNWVRQAPGKGLEWVSYISSRGSTINYADSVRGRFTISRDNGRNSLYLQMNSLRDDDTAVYYCGSLTSFWGQGTVVTVSS

SEQ ID NO: 28499 - protein, 91 aa, Homo sapiens; identical to SEQ ID NO: 28498

SEQ ID NO: 28500 - protein, 91 aa, Homo sapiens
AASGFTFSGYDINWVRQAPGKGLEWVSYISSKGSAINYADSVRGRFTISRDNDRNSAFLQMNSLRDDDTAVYYCGSLTSFWGQGTVVIVSS

SEQ ID NO: 28501 - protein, 91 aa, Homo sapiens
AASGFTFSGYDMNWVRQAPGKGLEWVSYISSKGSAINYADSVRGRFTISRDNDRNSVYLQMNSLRDDDTAVYYCGSLTSFWGQGTVVTVSS

SEQ ID NO: 28502 - protein, 91 aa, Homo sapiens
AASGFTFSGYDMNWVRQAPGKGLEWISYISSKGSAINYADSVRGRFTISRDNDRNSVYLQMNSLRDDDTAVYYCGSLTSFWGQGTVVTVSS

SEQ ID NO: 28503 - protein, 91 aa, Homo sapiens
EASGFTFSGYDMNWVRQAPGKGLEWVSYISSKGAAINYADSVRGRFTIHRDNDRKSVYLQMNSLRDDDTAVYYCGSLTSFWGQGTVVIVSS

SEQ ID NO: 28504 - protein, 91 aa, Homo sapiens; identical to SEQ ID NO: 28501

SEQ ID NO: 28505 - protein, 98 aa, Homo sapiens
AASGFTFSYYPMSWVRQAPGKGLEWVSTIGDSGGETYYADSVRGRFTISRDNSKNTLFLQVNSLRSEDTAVYYCAKHIRNANSQFDYWGQGTLVTVSS

SEQ ID NO: 28506 - protein, 98 aa, Homo sapiens
AASGFTFSDYPMTWVRQAPGKGLEWVSTIGDYGGDIYYADSVRGRFTISRDNSKNTLFLQMNSLRSEDTAVYYCAKHIRNANSQFDYWGQGTLVTVSS

SEQ ID NO: 28507 - protein, 98 aa, Homo sapiens
AASGFTFSDHPMTWVRQAPGKGLEWVSTIGDYGGDIYYADSVRGRFTISRDNSKNTLFLQMNSLRSEDTAVYYCAKHIRNANSQFDYWGQGTLVTVSS

SEQ ID NO: 28508 - protein, 99 aa, Homo sapiens
TVSGGSVSSGGYYWNWIRQHPGKGLEWIGYISYSGTTYSNPSLKSRISISVDTSRNQISLKLSSVTAADTAVYYCARDREGSGSYYAYWGQGTLVTVSS

SEQ ID NO: 28509 - protein, 99 aa, Homo sapiens
TVSGGSVSSGGYYWNWIRQHPGKGLEWIGYISYSGTTYSNPSLKSRITIAIDTSRNQISLKLRSVTAADTARYYCARDREGSGSYYAYWGQGTLVTVSS

SEQ ID NO: 28510 - protein, 99 aa, Homo sapiens
TVSGGSVSSGGYHWNWIRQHPGKGLEWIGYISYSGSTYSNPSLKSRVTISVDTSRNQISLKLSSVTAADTAVYYCARDREGSGSYYAYWGQGTPVTVSS

SEQ ID NO: 28511 - protein, 104 aa, Homo sapiens
KGSGYSFSNYWIGWVRQMPGKGLEWMGIIYPDDSDTTYSPSFKGHVTISVDKSVSTAYLQWSSLKASDTAMYYCARQSHIVMATTPQYDPFDMWGQGTMVTVSS

SEQ ID NO: 28512 - protein, 104 aa, Homo sapiens
KGSGYSFTNYWIGWVRQMPGKGLEWMGIIYPDDSDTTYSPSFKGHVTISVDKSVSTAYLQWSSLKASDTAMYYCARQSHIVMATTPQYDPFDMWGQGTMVTVSS

SEQ ID NO: 28513 - protein, 99 aa, Homo sapiens
AASGFTFGDYAMHWVRQAPGKGLEWVAVISYNGDTKFYADSVKGRFTISRDSPKNTLYLQMNSLRAEDSAVYYCARDMFRGVPDYLDYWGQGTLVTVSS

SEQ ID NO: 28514 - protein, 99 aa, Homo sapiens
AASGFTLSSYTMHWVRQTPDMGLQWVAVLSYDGEYKIYADSVKGRFTISRDDSKNTLYLQMDSLRPEDTAVYFCARDMFRGVPDYLDYWGQGTLVTVSS

SEQ ID NO: 28515 - protein, 99 aa, Homo sapiens
AASGFTFGDYAMHWVRQAPGKGLEWVAVISYNGDTKFYADSVKGRFTISRDSPKNTLYLQMNNLRAEDSAVYYCARDMFRGVPDYLDYWGQGTLVTVSS

SEQ ID NO: 28516 - protein, 99 aa, Homo sapiens
AASGFTFGDYAFHWVRQAPGKGLEWVAVISYNGDTKFYADSVKGRFTISRDGPKNTLYLQMNSLRAEDSAVYYCARDMFRGVPDYLDYWGQGTLVTVSS

SEQ ID NO: 28517 - protein, 99 aa, Homo sapiens
TVSGGSTSTRNYCWGWIRQAPGKGLEWIGTVYYSGSTNYNLSLKSRVTISLDTSKNQFSLKLSSVTAADTAVYYCARQSTTSVALFDYWGQGTLVTVSS

SEQ ID NO: 28518 - protein, 99 aa, Homo sapiens
TVSGGSTSTRNYCWGWIRQAPGKGLEWMGTVYYGGSTNYNLSLKSRVTISLDTSKNQFSLKLSSVTAADTAVYYCARQSTTSVALFDYWGQGTLVTVSS

SEQ ID NO: 28519 - protein, 99 aa, Homo sapiens
SVSGGSTSTRNYCWAWIRLAPGKGLEWVGTVYYNGNTNYNLSFKGRVTISLDTSKNQFSLRLSSVTAADTAVYYCARQSTTSVALFDYWGQGTLVTVSS

SEQ ID NO: 28520 - protein, 99 aa, Homo sapiens
TVSGGSTSTRNYCWGWIRQAPGKGLEWMGTVYYGGSTNYNLSLKSRVTISLDTSKNQFSLKLSSVTAADTALYYCARQSTTSVALFDYWGQGTLVTVSS

SEQ ID NO: 28521 - protein, 93 aa, Homo sapiens
TVSGASIRSYYWSWIRQPPGKGLEWIGYVYHTGTTNYNPSLGSRVTISVDTSKNQFTLNLTSVTAADTAIYYCACLAPADIPWGQGTLVTVSS

SEQ ID NO: 28522 - protein, 93 aa, Homo sapiens
TVSGVSIGSYYWSWIRQPPGKGLEWIGYVYSTGSTDYNPSLKGRVTISVDTSKNQFSLNLTSVTTADTAVYYCACLAPADIPWGQGTLVTVSS

SEQ ID NO: 28523 - protein, 93 aa, Homo sapiens
TVSGVSIRSYYWSWVRQPPGKGLEWIGYVYSTGSADYNPSLASRVTILVDTSKNQFSLKLTSVTAADTAVYYCACLAPADIPWGQGTLVTVSS

SEQ ID NO: 28524 - protein, 93 aa, Homo sapiens
SVSGVSIRSYYWSWVRQPPGKGLEWIGSVYSTGSADYNPSLSSRATISVDTSKNQFSLKLTSVTAADTAVYYCACLAPADIPWGQGTRVTVSS

SEQ ID NO: 28525 - protein, 93 aa, Homo sapiens
TVSGVSITSYFWSWVRQPPGKGLEWIGYVYSTGSADYNPSLSGRATISIDTSKNQFSLTLTSVTAADTAVYYCACLAPADIPWGQGTLVTVSS

SEQ ID NO: 28526 - protein, 93 aa, Homo sapiens
TVSGVSITSYFWSWVRQPPGKGLEWIGYVYSTGSADYNPSLSGRATISIDTSKNQFPLTLTSVTAADTAVYYCACLAPADIPWGQGTLVTVSS

SEQ ID NO: 28527 - protein, 97 aa, Homo sapiens
AASGFTFSYYWMGWVRQAPGKGLIWVANIKQDGSEKNYVDSVKGRFTISRDNAKNSLYLQMNSLRAEDTAVYYCVREGGSGYSFDSWGQGTLVTVFS

SEQ ID NO: 28528 - protein, 97 aa, Homo sapiens
AASGFTFSYYWMSWVRQAPGKGLIWVANIKQDGSEKNYVDSVKGRFTISRDNAKNSLYLQMNSLRAEDTAVYYCVREGGSGYSFDSWGQGTLVTVFS

SEQ ID NO: 28529 - protein, 97 aa, Homo sapiens; identical to SEQ ID NO: 28527

SEQ ID NO: 28530 - protein, 97 aa, Homo sapiens; identical to SEQ ID NO: 28528

SEQ ID NO: 28531 - protein, 97 aa, Homo sapiens
AASGFTFSYYWMGWVRQAPGKGLIWVANIKQDGSEKNYVDSVKGRFTISRDNAKNSLYLQVNSLRAEDTAVYYCVREGGSGYSFDSWGQGTLVTVFS

SEQ ID NO: 28532 - protein, 97 aa, Homo sapiens
AASGFTFSYYWMGWVRQAPGKGLIWVANIKQDGSEKNYVDSVKGRFTISRDNAKNSLYLQMNSLRAEDTALYYCVREGGSGYSFDSWGQGTLVTVFS

SEQ ID NO: 28533 - protein, 97 aa, Homo sapiens
AASGFTFSYFWMSWVRQAPGKGLIWVANIKQDGSEKNYVDSVRGRFTISRDNAKNSLYLQMNSLRAEDTAVYYCVREGGSGYSFDSWGQGTLVTVFS

SEQ ID NO: 28534 - protein, 97 aa, Homo sapiens
AASGFTFSYYWMGWVRQAPGKGLIWVANIKQDGSEKNYVDSVKGRFTISRDNAKNSLYLQMNSLRGEDTAVYYCVREGGSGYSFDSWGQGTLVTVFS

SEQ ID NO: 28535 - protein, 97 aa, Homo sapiens
EASGFTFSYYWMSWVRQAPGKGLIWVANIKQDGSEKNYVDSVKGRFTISRDNAKNSLYLQMNSLRAEDTAVYYCVREGGSGYSFDSWGQGSLVTVFS

SEQ ID NO: 28536 - protein, 95 aa, Homo sapiens
AASGFTFSYFWMGWVRQAPGKGLIWVANIKQDGSEKNYVDSVKGRFTISRDNAKNSLYLQINSLRAEDTAVYYCVREGGSGYSFDSWGQGTLVTV

SEQ ID NO: 28537 - protein, 97 aa, Homo sapiens
AASGFTFSYYWMGWVRQAPGKGLIWVANIKQDGSEKNYVDSVKGRFTISRDNAKNSLSLQMNSLRAEDTAVYYCVREGGSGYSFDSWGQGSLVTVFS

SEQ ID NO: 28538 - protein, 97 aa, Homo sapiens; identical to SEQ ID NO: 28528

SEQ ID NO: 28539 - protein, 97 aa, Homo sapiens; identical to SEQ ID NO: 28528

SEQ ID NO: 28540 - protein, 97 aa, Homo sapiens
AASGFTFSYFWMGWVRQAPGKGLIWVANIKQDGSEKNYVDSVKGRFTISRDNAKNSLYLQMNSLRAEDTAVYYCVREGGSGYSFDSWGQGALVTVFS

SEQ ID NO: 28541 - protein, 97 aa, Homo sapiens; identical to SEQ ID NO: 28528

SEQ ID NO: 28542 - protein, 97 aa, Homo sapiens; identical to SEQ ID NO: 28527

SEQ ID NO: 28543 - protein, 97 aa, Homo sapiens
AASGFTFSYYWMSWVRQAPGKGLIWVANIKQDGSEKNYVDSVKGRFTVSRDNAKNSLYLQMNSLRAEDTAVYYCVREGGSGYSFDSWGQGTLVTVFS

SEQ ID NO: 28544 - protein, 97 aa, Homo sapiens
AASGFTFSYYWMGWVRQAPGKGLIWVANIKQDGSEKNYVDSVKGRFTISRDNAKNSLYLQMNSLRPEDTAVYYCVREGGSGYSFDSWGQGTLVTVFS

SEQ ID NO: 28545 - protein, 97 aa, Homo sapiens
AASGFTFSYFWMGWVRQAPGKGLIWVANIKQDGSEKNYVDSVKGRFTISRDNAKNSLYLQMNSLRAEDTAVYYCVREGGSGYSFDSWGQGTLVTVFS

SEQ ID NO: 28546 - protein, 97 aa, Homo sapiens
AASGFTFNYFWMGWVRQAPGKGLIWVANINQDGSERNYVDSVKGRFTISRDNAKNSLYLHMNSLRAEDTAVYYCVREGGSGYSFDSWGQGTLVTVFS

SEQ ID NO: 28547 - protein, 97 aa, Homo sapiens
AASGFTFSYYWMSWVRQAPGKGLIWVANIKQDGSEKNYVDSVKGRFTISRDNAKNSLYLQMNSLRVEDTAVYYCVREGGSGYSFDSWGQGTLVTVFS

SEQ ID NO: 28548 - protein, 97 aa, Homo sapiens
AASGFTFSYYWMSWVRQAPGKGLIWVANIKQDGSEKNYVDSVKGRFTISRDNAKNSLYLQMNSLRAEDTAIYYCVREGGSGYSFDSWGQGTLVTVFS

SEQ ID NO: 28549 - protein, 97 aa, Homo sapiens; identical to SEQ ID NO: 28527

SEQ ID NO: 28550 - protein, 97 aa, Homo sapiens
TVSGGPISRSNYFWGWIRQPPGKGLEWIGSIHYSGTTYYNPSLKSRVTISVDTSKNKISLMLRSVTAADTAVYYCARPLRGGEVDSWGQGTLVTVSS

SEQ ID NO: 28551 - protein, 97 aa, Homo sapiens; identical to SEQ ID NO: 28550

SEQ ID NO: 28552 - protein, 97 aa, Homo sapiens; identical to SEQ ID NO: 28550

SEQ ID NO: 28553 - protein, 97 aa, Homo sapiens; identical to SEQ ID NO: 28550

SEQ ID NO: 28554 - protein, 97 aa, Homo sapiens
TVSGGPISRSNYFWGWIRQPPGKGLEWIGSIHYSGTTYYNPSLKSRVNISVDTSKNKISLMLRSVTAADTAVYYCARPLRGGEVDSWGQGTLVTVSS

SEQ ID NO: 28555 - protein, 92 aa, Homo sapiens
AASGLIFTDHWMSWVRQAPGKGLEWVANINQDGSKNFYVGSVKGRFSISRDNAKNSVYLQMNSLRAEDTAVYYCSGGDYFDHWGQGTLVSVS

SEQ ID NO: 28556 - protein, 92 aa, Homo sapiens
AASGLIFSDHWMSWVRQAPGKGLEWVANIKQDGSKKFYVGSVKGRFSISRDNAKNSVYLQMNSLRAEDTAMYYCSGGDYFDHWGQGTLVSVS

SEQ ID NO: 28557 - protein, 92 aa, Homo sapiens
VASGLIFSEHWMSWVRQAPGKGLEWVANINQDGSKKFCVESVKGRFSISRDNAKKSVYLQMKSLRAEDTAVYYCSGGDYFDHWGQGTLVSVS

SEQ ID NO: 28558 - protein, 92 aa, Homo sapiens
AASGLIFSDHWMSWVRQAPGKGLEWVANINQDGSKKFYVGSVKGRFSISRDNAKNSVFLQMNSLRAEDTAVYYCSGGDYFDHWGQGTLVSVS

SEQ ID NO: 28559 - protein, 92 aa, Homo sapiens
AASGLIFSDHWMSWVRQAPGKGLEWVANINQDGSKKFYVGSVKGRCSISRDNAKNSVYLQMNSLRAEDTAVYYCSGGDYFDHWGQGTLVSVS

SEQ ID NO: 28560 - protein, 92 aa, Homo sapiens
AASGLIFSDHWMSWVRQAPGKGLEWVANINQRGSQKFYVESVKGRFSISRDNAKNSVYLQMNSLRAEDTAVYYCSGGDYFDHWGQGTLVSVS

SEQ ID NO: 28561 - protein, 92 aa, Homo sapiens
AASGLIFSDHWMSWVRQAPGRGLEWVANINQEGSKKFYVGSVKGRCSISRDNAKNSVYLQMNRLRAEDTAVYYCSGGDYFDHWGQGTLVSVS

SEQ ID NO: 28562 - protein, 92 aa, Homo sapiens
AASGLIFSDHWMTWVRQAPGKGLEWVANINQDGSKKFYVGSVKGRFSISRDNAKKSVSLQMNSLRAEDTAVYYCSGGDYFDHWGQGTLVSVS

SEQ ID NO: 28563 - protein, 97 aa, Homo sapiens
ATSGFTFSSYSMNWVRQAPGKGLEWVSYIGSSSSPIYYADSVKGRFTISRDNAKSSVYLQMNTLRDEDTAVYYCARLPWSAGGAQNWGQGTLVTVSS

SEQ ID NO: 28564 - protein, 97 aa, Homo sapiens
ATSGFTFSHYSMNWVRQAPGKGLEWVSYIGSSSSPIYYADSVKGRFTISRDNAKSSVYLQMNSLRDEDTAVYYCARLPWSAGGAQNWGQGTLVTVSS

SEQ ID NO: 28565 - protein, 97 aa, Homo sapiens
ASSGFTFSTYSMNWVRQAPGKGLEWVSYIGSSSSPIYYADSVKGRFTVSRDNAKSSLYLQMNTLRDEDTAVYYCARLPWSAGGAQNWGQGTLVTVSS

SEQ ID NO: 28566 - protein, 97 aa, Homo sapiens
ATSGFTFSSYSMNWVRQAPGKGLEWVSYIGSSSSPIYYADSVKGRFTISRDNAKNSVYLQMNSLRDEDTAVYYCARLPWSAGGAQNWGQGTLVTVSS

SEQ ID NO: 28567 - protein, 97 aa, Homo sapiens
AASGFTFNTYSMNWVRQAPGKGLEWVSYISSSTGTIYYADSVKGRFTISRDNAKNSLYLQMNSLRDDDTAVYYCARLPWSAGGAQNWGQGTLVTVSS

SEQ ID NO: 28568 - protein, 97 aa, Homo sapiens; identical to SEQ ID NO: 28565

SEQ ID NO: 28569 - protein, 97 aa, Homo sapiens; identical to SEQ ID NO: 28563

SEQ ID NO: 28570 - protein, 97 aa, Homo sapiens
ATSGFTFNSYSMNWVRQAPGKGLEWVSYIGSSGSPIYYADSVKGRFTISRDNAKNSLYLQMNSLRDEDTAVYYCARLPWSAGGAQNWGQGTLVTVSS

SEQ ID NO: 28571 - protein, 97 aa, Homo sapiens
AASGFTFSTYSMNWVRQAPGKGLEWISYINSGGGTVYYADSVKGRFTISRDNAKNSLYLQMNSLRDDDTAVYYCARLPWSAGGAQNWGQGTLVTVSS

SEQ ID NO: 28572 - protein, 97 aa, Homo sapiens
AASGFTFNTYSMNWVRQAPGKGLEWVSYISSSSSTIYYADSVKGRFTISRDNAKNSLYLQMNSLRDEDTAVYYCARLPWSAGGAQNWGQGTLVTVSS

SEQ ID NO: 28573 - protein, 97 aa, Homo sapiens
AASGFTFNTYSMNWVRQAPGKGLEWVSYISSSSSTIYYADSVKGRFTISRDNAKNSLYLQMNSLRDDDTAVYYCARLPWSAGGAQNWGQGTLVTVSS

SEQ ID NO: 28574 - protein, 97 aa, Homo sapiens
ATSGFTFSTYSMNWVRQAPGKGLEWVSYIGSSSSPIYYADSVKGRFTVSRDNAKSSLYLQMNTLRDEDTAVYYCARLPWSAGGAQNWGQGTLVTVSS

SEQ ID NO: 28575 - protein, 97 aa, Homo sapiens
ATSGFTFSTYSMNWVRQAPGKGLEWVSYIGSSSSPIYYADSVKGRFTISRDNAKTSLYLQMNSLRDEDTAVYYCARLPWSAGGAQNWGQGTLVTVSS

SEQ ID NO: 28576 - protein, 92 aa, Homo sapiens
VSEFTCDTCSMTWVRQAPGKGLEWVSTSATKTYYADSVKGRFTISRDTSKNTLFLQMNSLRVEDTAIYYCVKGGRGDLLAYWGQGTLVTVSS

SEQ ID NO: 28577 - protein, 93 aa, Homo sapiens
AVSEFTCSTCSMTWVRQAPGKGLEWVSTSGTNTYYADSVKGRFTISRDNSKNTLFLQMNSLRAEDTAIYYCVKGGRGDLLAYWGQGTLVTVSS

SEQ ID NO: 28578 - protein, 93 aa, Homo sapiens
ASGYTFTTYDIHWVRQATGQGLEWMGWMNPHSGNTGYAQNFQGRVTMTSSTPISTAYMELSRLRSDDTAVYYCTRKPFPSDYWGQGTLVTVSS

SEQ ID NO: 28579 - protein, 93 aa, Homo sapiens
ASGYTFTTYDIHWVRQATGQGLEWMGWMNPHSGNTGYAQKFQGRVTMTSSTPISTAYMELSSLRSDDTAVYYCTRKPFPSDYWGQGTLVTVSS

SEQ ID NO: 28580 - protein, 98 aa, Homo sapiens
TVSAGSISSANYYWSWIRQHPGKGLEWIGYIYYSGTTYYNPSLKSRVTISGDTSKNQVSLKLSSVTAADTAVYYCARDGQGGYGAFDIWGQGTMVTVS

SEQ ID NO: 28581 - protein, 98 aa, Homo sapiens
TVSAGSISSANYYWSWIRQHPGKGLEWIGYIYYSGTTYYNPSLKSRVTISGDTSKNQVSLNLSSVTAADTAVYYCARDGQGGYGAFDIWGQGTMVTVS

SEQ ID NO: 28582 - protein, 98 aa, Homo sapiens; identical to SEQ ID NO: 28580

SEQ ID NO: 28583 - protein, 98 aa, Homo sapiens
TVSGGSISSGNYYWSWIRQHPGKGLEWIGYIYYSGSTYYNPSLKSRVTISVDTSKIQFSLKLSSVTAADTAVYYCARDGQGGYGAFDIWGQGTMVTVS

SEQ ID NO: 28584 - protein, 98 aa, Homo sapiens; identical to SEQ ID NO: 28580

SEQ ID NO: 28585 - protein, 100 aa, Homo sapiens
AASGFTFSRYWMSWVRQAPGKGLEWVANIKQDGSETYCIDSVKGRFTISRDNAKNSLYLQMNSLRAEDTAVYYCARGTEWLDASAVGDCWGQGTLVTVSS

SEQ ID NO: 28586 - protein, 100 aa, Homo sapiens
AASGFTFSSYWMSWVRQAPGKGLEWVANIKQDGSETYCIDSVKGRFTISRDNAKNSLYLQMNSLRAEDTAVYYCARGTEWLDASAVGDCWGQGTLVTVSS

SEQ ID NO: 28587 - protein, 100 aa, Homo sapiens
AASGFTFRSYWMSWVRQAPGKGLEWVANIKQDGSETYCIDSVKGRFTISRDNAKNSLYLQMNSLRAEDTAVYYCARGTEWLDASAVGDCWGHGTLVTVSS

SEQ ID NO: 28588 - protein, 100 aa, Homo sapiens; identical to SEQ ID NO: 28585

SEQ ID NO: 28589 - protein, 100 aa, Homo sapiens
AASGFTFSRYWMSWVRQAPGKGLEWVANIKQDGSETYCIDSVKGRFTISRDNAKNTLYLQMNSLRAEDTAVYFCARGTEWLDASAVGDCWGQGTLVTVSS

SEQ ID NO: 28590 - protein, 94 aa, Homo sapiens
APSGFTFSDYWMSWVRQAPGKGLEWVANINQYGSADYYADSVKGRFSISRDNTKNSLYLQMNSLRAEDTATYYCARGNYGLDHWGQGTLVTVSS

SEQ ID NO: 28591 - protein, 93 aa, Homo sapiens
APSGFIFSDYWMGWVRQAPGKGLEWVANIKNDGSGDFHVDSVKGRFTISRDNAKNSLYLQMNSLRPEDTAIYYCARGNYGLDHWGQGTLVTVS

SEQ ID NO: 28592 - protein, 105 aa, Homo sapiens
TVSGGSVSSASYYWSWIRQPPGKGLEWIGYIYYSGTTNYNPSLKSRVTLSVDTSKNRFSLRLSSVTAADTAVYYCAREPFSVVRGIIIQNPLDYWGQGTLVTVSS

SEQ ID NO: 28593 - protein, 105 aa, Homo sapiens
TVSGGSVSSASYYWSWIRQPPGKGLEWIGYIDYRGTTNYNPSLKSRVTLSVDTSKNRFSLRLSSVTAADTAVYYCAREPFSVVRGIIIQNPLDYWGQGALVTVSS

SEQ ID NO: 28594 - protein, 105 aa, Homo sapiens
TVSGGSVSNANYYWSWIRQPPGKGLEWIGYIYYSGTTNYNPSLKSRVTLSVDTSKNRFSLRLSSVTAADTAVYYCAREPFSVVRGIIIQNPLDYWGQGTLVTVSS

SEQ ID NO: 28595 - protein, 98 aa, Homo sapiens
AASGFTFSDYYMTWIRQAPGKGLEWLSYISARDSATFYADAVKGRFSISRDNAKNSLYLQMNSLRAEDTAVYFCVRITRQWGFYFDSWGQGTLVTVSS

SEQ ID NO: 28596 - protein, 98 aa, Homo sapiens
AASGFTFSDYYMSWIRQAPGKGLEWLSYISARDSATFYADAVKGRFSISRDNAKNSLYLQMNSLRAEDTAVFYCVRITRQWGFYFDSWGQGTLVTVSS

SEQ ID NO: 28597 - protein, 103 aa, Homo sapiens
VASGFNFSSYWMSWVRQAPGKGLEWVANIKEDGSENYLVDSVKGRFTISRDNARTSLYLQMNSLRAEDTAVYYCARLHGYWNGYGYYYYMDVWGNGTTVTVSS

SEQ ID NO: 28598 - protein, 103 aa, Homo sapiens
AASGFNFSSYWMSWVRQAPGKGLEWVANIKEDGSEKYSVDSVKGRFTISRDNARTSLYLQMNSLRAEDTAVYYCARLHGYWNGYGYYYYMDVWGNGTTVTVSS

SEQ ID NO: 28599 - protein, 102 aa, Homo sapiens
ASGFNFSSYWMSWVRQAPGKGLEWVANIKEDGSENYLVDSVKGRFTISRDNARTSLYLQMNSLRAEDTAVYYCARLHGYWNGYGYYYYMDVWGNGTTVTVSS

SEQ ID NO: 28600 - protein, 103 aa, Homo sapiens
AASGFNFSNYWMTWVRQAPGKGLEWVANIKEDGSEDYSVDSVKGRFSISRDNARTSLFLQMNSLRAEDTAVYYCARLHGYWNGYGYYYYMDVWGNGTTVTVSS

SEQ ID NO: 28601 - protein, 97 aa, Homo sapiens
TVSGDSITSYYWSWIRQTPGKGLEWIGYISHSESSNFNPSLRSRVTISADTSKNQFSLRLSSVTAADTALYYCARRNYDANGPFDYWGQGTLVTVSS

SEQ ID NO: 28602 - protein, 97 aa, Homo sapiens
TVSGVSITSYYWSWIRQPPGKGLEWIGYISHSGSSNYNPSLRSRVTISADTSKNQFSLRLSSVTAADTALYYCARRNYDANGPFDYWGQGTLVTVSS

SEQ ID NO: 28603 - protein, 97 aa, Homo sapiens
TVSGGSITSYYWSWIRQPPGKGLEWIGYISHSGSSNYNPSLRSRVSISADTSKNQFSLRLSSVTAADTALYYCARRNYDANGPFDYWGQGTLVTVSS

SEQ ID NO: 28604 - protein, 98 aa, Homo sapiens
VGSRFIFSTYWMSWVRQAPGKGLEWVANIKEDGSQIHHVDSVKGRFTISRDNAKNSLFLQMNSLGAEDTAVYYCAREAVGTGAAFDVWGLGTMVTVSS

SEQ ID NO: 28605 - protein, 98 aa, Homo sapiens
VGSRFIFSRYWMSWVRQAPGKGLEWVANIKEDGSQIHHVDSVKGRFTISRDNAKNSLFLQMDSLGAEDTAVYYCAREAVGTGAAFDVWGLGTMVTVSS

SEQ ID NO: 28606 - protein, 100 aa, Homo sapiens
GSGYRFATHWIGWVRQKPGKGLEWMGNIYPDDSDIRYSPSSQGQVTISVDKATRTAYLEWGSLKTSDTATYYCVTRGSSGIYGGWFFEYWGQGTRVTVSS

SEQ ID NO: 28607 - protein, 100 aa, Homo sapiens
GSGYRFATHWIGWVRQKPGKGLEWMGNIYPDDSDTRYSPSSQGQVTISVDKATRTAYLQWDSLKTSDTATYYCVTRGSSGIYGGWFFEYWGQGTRVTVSS

SEQ ID NO: 28608 - protein, 108 aa, Homo sapiens
TVSGGSISSSSYYWGWIRQPPGKGLEWIGSIYYSGSTYYNPSLKSRVTISVDTSKNQFSLKLSSVTAADTAVYYCARGGYHSTRRHPPRKRDYYMDVWGTGTTVTVSS

SEQ ID NO: 28609 - protein, 108 aa, Homo sapiens
TVSGGSISSSNYYWGWIRQPPGKGLEWIGSIYHTGSTYYNPSLKSRVTISVDTSKNQFSLKLNSVTAADTAVYYCARGGYHSTRRHPPRKRDYYMDVWGTGTTVTVSS

SEQ ID NO: 28610 - protein, 108 aa, Homo sapiens; identical to SEQ ID NO: 28608

SEQ ID NO: 28611 - protein, 108 aa, Homo sapiens; identical to SEQ ID NO: 28608

SEQ ID NO: 28612 - protein, 108 aa, Homo sapiens
TVSGGSISSSSYYWGWIRQPPGKGLEWIGSMYYSGSTHYNPSLKSRVTISLDTSKNQFSLKLNSVTAADTAVYYCARGGYHSTRRHPPRKRDYYMDVWGTGTTVTVSS

SEQ ID NO: 28613 - protein, 108 aa, Homo sapiens
TVSGGSISSSSYYWGWIRQPPGKGLEWIGSIYYSGSTYYNPSLKSRVTISVDTSKNQFSLKLNSVTAADTAVYYCARGGYHSTRRHPPRKRDYYMDVWGTGTTVTVSS

SEQ ID NO: 28614 - protein, 98 aa, Homo sapiens
AASGFTFSSCDMHWVRQAPGKGLEWVSAISAGGSATYYADSVKGRFTISRDNSKNTLYLQTNSLRAEDTALYYCVKRYTPTSGPLDFWGQGTLVAVSS

SEQ ID NO: 28615 - protein, 98 aa, Homo sapiens; identical to SEQ ID NO: 28614

SEQ ID NO: 28616 - protein, 98 aa, Homo sapiens
AASGFIFSSCDMHWVRQAPGKGLEWVSAISAGGSVTYYADSVKGRFTVSRDNSKNTLYLQTNSLRAEDTALYYCVKRYTPTSGPLDFWGQGTLVAVSS

SEQ ID NO: 28617 - protein, 98 aa, Homo sapiens; identical to SEQ ID NO: 28614

SEQ ID NO: 28618 - protein, 98 aa, Homo sapiens
AASGFTFSSCDMHWVRQAPGKGLEWVSAISAGGSATYYADSVKGRFTISRDNSKNTLYLQTNSLRAEDTALYYCVKRYTPTSGPLDFWGQETLVAVSS

SEQ ID NO: 28619 - protein, 96 aa, Homo sapiens
AASGFSFDSSAMNWVRQAPGKGLEWVSVISIGGDDIYYADSVKGRFTISRDNSKNTLYLQMNSLRADDTAVYYCARQIGHLPGDYWGQGTLVTVSS

SEQ ID NO: 28620 - protein, 96 aa, Homo sapiens
AVSGFTFSNAAMNWVRQAPGKGLEWLSVISIGGDDTYYADSVKGRFTISRDNSKNTLYLQMNSLRADDTAVYYCARQIGHLPGDYWGQGTLVTVSS

SEQ ID NO: 28621 - protein, 102 aa, Homo sapiens
AASGFTFSDHYMDWVRQVPGKGLEWVGRSRNRGRSYTTEYAASVKGRFTVSRDDSKDSMYLQMNSLKTEDMAVYYCTRLTPGTKGDYYMDVWGTGTTVTVSS

SEQ ID NO: 28622 - protein, 102 aa, Homo sapiens
AGSGFRLSDHYMDWVRQVPGKGLEWVGRSRDKGRGYTTEYAASAKGRFTVSRDDSRDSFYLQMNSLKTEDTAVYYCTRLTPGTKGDYYMDVWGTGTTVTVSS

SEQ ID NO: 28623 - protein, 102 aa, Homo sapiens
AASGFTFSDHYMDWVRQVPGKGLEWVGRSRDKAHSYTTEYAASVKGRFTVSRDDSKDSLYLQMNSLKTEDTAVYYCTRLTPGTKGDYYMDVWGTGTTVTVSS

SEQ ID NO: 28624 - protein, 94 aa, Homo sapiens
AASGFTFSNAWMSWVRQAPGKGLEWVGRVKTKTDGGTIDYAAPVRGRFTISRDDSKNTLYLQMNSLKTEDSAVYYCSTSRGDYWGQGTLVTVSS

SEQ ID NO: 28625 - protein, 94 aa, Homo sapiens
AASGFTFSNAWMSWVRQAPGKGLEWVGRVKSKTDGGTIDYAAPVRGRFTISRDDSKNTLYLQMNSLKTEDSAVYYCSTSRGDYWGQGTLVTVSS

SEQ ID NO: 28626 - protein, 94 aa, Homo sapiens
AASGFTFSNAWMSWVRQAPGKGLEWVGRVKTKADGGTIDYAAPVRGRFTISRDDSKNTLYLQMNSLKTEDSAVYYCSTSRGDYWGQGTLVTVSS

SEQ ID NO: 28627 - protein, 92 aa, Homo sapiens
GFSPPSYGMSWVRQAPGKGLQWVSFIDGGGGWTAYADSVKGRFTISRDNSKNTLYLQMNSLIIEDTAVYFCANHNDAGDYNWGQGTLVTVSS

SEQ ID NO: 28628 - protein, 93 aa, Homo sapiens
SGFTPLSYGMSWVRQAPGKGLEWVSFVDGGGAWTAYADSVKGRFTISRDNSKNTLYLQMNSLIVEDTAVYFCANHNDAGDYNWGQGTLVTVSS

SEQ ID NO: 28629 - protein, 93 aa, Homo sapiens; identical to SEQ ID NO: 28628

SEQ ID NO: 28630 - protein, 97 aa, Homo sapiens
TVSGASISSSGYYWAWIRQPPGKGLEWIGSISYSGTTFYSPSLKSRLTISADTSKNHFSLQLSSVTAADTAVYYCARREIVNTIDYWGQGTLVTVSS

SEQ ID NO: 28631 - protein, 97 aa, Homo sapiens; identical to SEQ ID NO: 28630

SEQ ID NO: 28632 - protein, 97 aa, Homo sapiens
TVSGASITSSGYYWAWIRQSPGKGLEWIGSISYSGTTFYSPSLKSRLTISADTSKNHFSLQLNSVTAADTAVYYCARREIVNTIDYWGHGTLVTVSS

SEQ ID NO: 28633 - protein, 97 aa, Homo sapiens; identical to SEQ ID NO: 28630

SEQ ID NO: 28634 - protein, 95 aa, Homo sapiens
AASGFTFGSYVMHWLRQGTGESPEWVSTIGTAGDTYYPGSVKGRFTISRDNAKNSLYLQMNSLRAGDTAVYYCARADRSGYYDLWGQGTQVTVSS

SEQ ID NO: 28635 - protein, 95 aa, Homo sapiens
AASGFTFGTYDMHWVRQGRGKGPEWVSAIGTVGDTYYPGSVKGRFTISRENAKNSLYLQMNNLRAGDTAVYYCARADRSGYYDLWGQGTQVTVSS

SEQ ID NO: 28636 - protein, 102 aa, Homo sapiens
AASGVTVSGDYMSWVRQAPGKGLEWVSVIYRDGQTYYIDSVKGRFTISRDNSKNTLYLQMNSLRVEDTALYYCARGGGAYCGSDCLRTIDIWGQGTLVTVSS

SEQ ID NO: 28637 - protein, 101 aa, Homo sapiens
AASGVTVSDDYMSWVRQAPGKGLEWVSVMYRDGKTYYTDSVKGRFTISRDNSKNTLYLQMNSLRVEDTALYYCARGGGAYCGSDCLRTIDIWGQGTLVTVS

SEQ ID NO: 28638 - protein, 106 aa, Homo sapiens
AVYGGSFSGYYWTWIRQPPGKGLEWIGEINHSGSTNYNPSLKTRLTISVDTSKNQFSLKVSSVTAADTAVYYCARGSPYYDFWSAMEYYYYYMDVWGKGTTVTVSS

SEQ ID NO: 28639 - protein, 106 aa, Homo sapiens
AVYGGSFSGYYWSWIRQPPGKGLEWIGEINHSGSTNYNPSLKSRVTISVDTSKNQFSLKVTSVTAADTAVYYCARGSPYYDFWSAMEYYYYYMDVWGKGTTVTVSS

SEQ ID NO: 28640 - protein, 106 aa, Homo sapiens
AVYGGSFSGYYWTWIRQTPGKGLEWIGEINHSGSTNYNPSLKTRLTISVDTSKNQFSLKVSSVTAADTAVYYCARGSPYYDFWSAMEYYYYYMDVWGKGTTVTVSS

SEQ ID NO: 28641 - protein, 98 aa, Homo sapiens
AASGFTFSSFWMNWVRQAPGKGLEWVANIKRDGSEKYYVDSVKGRFTISRDNAKNSLYLQMNSLRAEDTAVYYCARDGVGYGGVLDYWGQGTLVTVSS

SEQ ID NO: 28642 - protein, 98 aa, Homo sapiens
AASGFTFSSFWMNWVRQAPGKGLEWVANIKQDGSEKYYVDSVKGRFTISRDNAKNSLYLQMNSLRADDTAVYYCARDGVGYGGVLDYWGQGTLVTVSS

SEQ ID NO: 28643 - protein, 98 aa, Homo sapiens
AASGFPFSSFWMNWVRQAPGKGLEWVANIKQDGSEKYYVDSVKGRFTVSRDNAKNSLYLQMNSLRAEDTAVYYCARDGVGYGGVLDYWGQGALVTVSS

SEQ ID NO: 28644 - protein, 98 aa, Homo sapiens
AASGFTFSSFWMNWVRQAPGKGLEWVANIRQDGSDKYYVDSVKGRFTISRDNAKNSLYLQMSSLTDEDTAVYYCARDGVGYGGVLDYWGQGTLVTVSS

SEQ ID NO: 28645 - protein, 98 aa, Homo sapiens
AASGFTFSSFWMNWVRQAPGKGLEWVANIKQDGSEKHYVDSVKGRFTISRDNAKNSLYLQMNSLRAEDTAVYYCARDGVGYGGVLDYWGQGTLVTVSS

SEQ ID NO: 28646 - protein, 100 aa, Homo sapiens
ASGYSFTSYWIGWVRQMPGKGLEWMGIIYPGDSDARYSPSFQGQVTISADTSITAVYLQWSSLRASDTAMYYCARQRRPLYTEPSRFDPWGQGTLVTVSS

SEQ ID NO: 28647 - protein, 100 aa, Homo sapiens
ASGYSFTSYWIGWVRQMPGKGLEWMGIIYPGDSDVRYSPSFQGQVTISADTSITAVHLQWSSLRASDTAMYYCARQRRPLYTEPSRFDPWGQGTLVTVSS

SEQ ID NO: 28648 - protein, 115 aa, Homo sapiens
TQTLTLTCTFSGFSLSTSGVGVGWMRQPPGKALEWLALIYWDDDKRYSPSLRSRLTITKDTSKNLVVLTMTNMDPVDTASYYCAHRQDGSCSPTRCNTHWGFDYWGQGALVTVSS

SEQ ID NO: 28649 - protein, 115 aa, Homo sapiens
TQTLTLTCTFSGFSLSTSGVGVGWIRQPPGKALEWLALIYWDDDKRYSPSLKSRLTITKDTSKNLVVLTMTNMDPVDTASYYCAHRQDGSCSPTRCNTHWGFDYWGQGALVTVSS

SEQ ID NO: 28650 - protein, 115 aa, Homo sapiens
TQTLTLTCTFSGFSLSTSGVGVGWMRQPPGKALEWLALIYWDDDKRYSPSLKSRLTITKDTSKNLVVLTMTNMDPVDTASYYCAHRQDGSCSPTRCNTHWGFDYWGQGALVTVSS

SEQ ID NO: 28651 - protein, 115 aa, Homo sapiens
TQTLTLTCTFSGFSLSTSGVGVGWIRQPPGKALEWLALIYWDDDKRYSPSLKSRLTITKDTSKNLVFLTMTNMDPVDTASYYCAHRQDGSCSPTRCNTHWGFDYWGQGALVTVSS

SEQ ID NO: 28652 - protein, 115 aa, Homo sapiens; identical to SEQ ID NO: 28649

SEQ ID NO: 28653 - protein, 115 aa, Homo sapiens
TQTLTLTCTFSGFSLSTNGVGVGWIRQPPGKALEWLALIYWDDDKRYSPSLKSRLTITKDTSKNLVFLTMTNMDPVDTASYYCAHRQDGSCSPTRCNTHWGFDYWGQGALVTVSS

SEQ ID NO: 28654 - protein, 115 aa, Homo sapiens
TQTLTLTCTFSGFSLSTSGVGVGWIRQPPGKALEWLALVYWDDDKRYRPSLKSRLTITKDTSKNLVFLTMTNMDPADTASYYCAHRQDGSCSPTRCNTHWGFDYWGQGALVTVSS

SEQ ID NO: 28655 - protein, 115 aa, Homo sapiens; identical to SEQ ID NO: 28651

SEQ ID NO: 28656 - protein, 101 aa, Homo sapiens
AASGFTFDDYGMSWVRQAPGKGLEWVSGISWNGGSTGYADSVKGRFTISRDNAKNSLYLQMSSLRAEDTALYQCAREYGDYPSNYYYMDVWGKGTTVTVSS

SEQ ID NO: 28657 - protein, 101 aa, Homo sapiens; identical to SEQ ID NO: 28656

SEQ ID NO: 28658 - protein, 98 aa, Homo sapiens
AASGFTFSSYGMSWVRQAPGKGLEWVSIISGGGSQTYYADSVKGRFTISRDNSKNTLYLQMNSLRVDDAAVYYCAKGGATAGYAFDIWGQGTMVTVSS

SEQ ID NO: 28659 - protein, 98 aa, Homo sapiens
AASGFSFSSYGMSWVRQAPGKGLEWVSIISGGGSHTYYADSVKGRFTISRDNSKNTLYLQMNSLRVDDAAVYYCAKGGATAGYAFDIWGQGTMVTVSS

SEQ ID NO: 28660 - protein, 98 aa, Homo sapiens
AASGFTFSSYGMNWVRQAPGKGLEWVSIISSSGGDTYYADSVKGRFTISRDNSKNTLFLQMNSLRVDDAAVYYCAKGGATAGYAFDIWGQGTMVTVSS

SEQ ID NO: 28661 - protein, 98 aa, Homo sapiens
AASGFTFSSYGMNWVRQAPGKGLEWVSIISNSGGDTYYADSVKGRFTISRDNSKNTLFLQMNSLRVDDAAVYYCAKGGATAGYAFDIWGQGTMVTVSS

SEQ ID NO: 28662 - protein, 98 aa, Homo sapiens
AASGFTFSSYGMNWVRQAPGKGLEWVSIISSSGGDRYYADSVKGRFTISRDNSKNTLFLQMNSLRVDDAAVYYCAKGGATAGYAFDIWGQGTMVTVSS

SEQ ID NO: 28663 - protein, 100 aa, Homo sapiens
AASGFTFSTYWMSWVRQAPGKGLEWVANIKQDGSEKYYVDSVKGRLTISRDNAKKSLYLQMNSLRVEDTAVYYCARDRGQYSNSWYIDYWGQGTLVTVSS

SEQ ID NO: 28664 - protein, 100 aa, Homo sapiens
AASGFTFSNYWMSWVRQAPGKGLEWVANIKQDGSEKYYVDSVKGRLTISRDNAKKSLYLQMNSLRVEDTAVYYCARDRGQYSNSWYIDYWGQGTLVTVSS

SEQ ID NO: 28665 - protein, 101 aa, Homo sapiens
AASGFTLSDYYMAWIRQAPGKGLDWVSYISNSGGSLQYADSVKGRFTISRDTAKNSLYLQMNSLRDEDTAVFYCARFGRGSDYFKNWFDSWGQGTLVTVSS

SEQ ID NO: 28666 - protein, 101 aa, Homo sapiens
AASGFTLSDYYMAWIRQAPGKGLEWVSYISNSGASLQYADSVKGRFTISRDNAKNSLYLQMNSLRDEDTAVFYCARFGRGSDYFKNWFDSWGQGTLVTVSS

SEQ ID NO: 28667 - protein, 101 aa, Homo sapiens
AASGFTLSDYYMAWIRQAPGKGLEWVSYISNSGGSLQYADSVKGRFTISRDNAKNSLYLQMNSLRDEDTAVFYCARFGRGSDYFKNWFDSWGQGTLVTVSS

SEQ ID NO: 28668 - protein, 97 aa, Homo sapiens
AASGFTFSNYGMHWVRQAPGKGLEWVAVIRYDGSNKYYADSVKGRFTISRDNSNNTLYVQMNSLRAEDTAVYYCGRERRDYYYMDVWGKGTTVTVSS

SEQ ID NO: 28669 - protein, 97 aa, Homo sapiens
AASGFTFSNYGMHWVRQAPGKGLEWVAVIRYDGSNKYYADSVKGRFTISRDNSNNTLYVQMNSLRAEDTAVCYCGRERRDYYYMDVWGKGTTVTVSS

SEQ ID NO: 28670 - protein, 97 aa, Homo sapiens
AASGFTFSSYGMHWVRQAPGKGLEWVAVIRYDGSNKYYADSVKGRFTISRDNSKNTLYVQMNSLRAEDTAVYYCGRERRDYYYMDVWGKGTTVTVSS

SEQ ID NO: 28671 - protein, 96 aa, Homo sapiens
VASGITFNKYWMSWARQAPGKGLVWVSSINSDMSSTSYADSVKGRFTISRDNAKNTLYLQMNILRGEDTAVYYCLRAGYRGGFDIWGQGTKVTVSS

SEQ ID NO: 28672 - protein, 96 aa, Homo sapiens
VASGITFKNYWMSWARQAPGKGLVWVSSINSDMSSKSYADSVKGRFTISRDNAGNTLYLQMNILEDEDTAVYYCLRAGYRGGFDIWGQGTKVTVSS

SEQ ID NO: 28673 - protein, 96 aa, Homo sapiens; identical to SEQ ID NO: 28672

SEQ ID NO: 28674 - protein, 96 aa, Homo sapiens
VASGITFERYWMSWARQAPGKGLVWVSSINSDATSRSYADSVKGRFTISRDNARSTVYLQMNSLRGEDTAVYYCLRAGYRGGFDIWGQGTKVFVSS

SEQ ID NO: 28675 - protein, 108 aa, Homo sapiens
AASGFTFSSYGMNWVRQAPGKGLEWVSSISGSSRYIYYADSVTGRFTISRDNAKNSLYLQMDSLRAEDTAVYFCARWDEDSSSWYRGSKYVFYYMDVWGKGTTVTVSS

SEQ ID NO: 28676 - protein, 108 aa, Homo sapiens
AGTGFTFSNYGMNWVRQAPGKGLEWVSSISGSSRYIYYADSVTGRFTISRDNAKNSLYLQMDSLRAEDTAVYFCARWDEDSSSWYRGSKYVFYYMDVWGKGTTVTVSS

SEQ ID NO: 28677 - protein, 93 aa, Homo sapiens
ASGVTFNTYAINWVRQAPGQGLEWMGGIIPPFGTAYYAQRFQGRVTITADESTSTAYMELSSLRSEDTAVYYCARGTTMANYWGQGTLVTVSS

SEQ ID NO: 28678 - protein, 93 aa, Homo sapiens
ASGVTFNTYAINWVRQAPGQGLEWMGGIIPPFGTANYAQRFQGRVTITADESTSTAYMDLSSLRSEDTAIYYCARGTTMANYWGQGTLVTVSS

SEQ ID NO: 28679 - protein, 93 aa, Homo sapiens
ASGVTFNTYAINWVRQAPGQGLEWMGGIIPPFGTANYAQRFQGRVTITADESTSTAYMELSSLRSEDTAVYYCARGTTMANYWGQGTLVTVSS

SEQ ID NO: 28680 - protein, 93 aa, Homo sapiens
ASRVIFNTHAINWVRQGPGQGLEWMGAIVPPFGIPNYAQTFQGRVTITADESTSTVYMELRSLRSEDTAVYYCARGTTMANYWGQGTLVTVSS

SEQ ID NO: 28681 - protein, 93 aa, Homo sapiens
ASGVTFNTYAINWVRQAPGQGLEWMGGIIPPFGTPYYAQRFQGRVTITADESTNTAYMELSSLRSEDTAVYYCARGTTMANYWGQGTLVTVSS

SEQ ID NO: 28682 - protein, 103 aa, Homo sapiens
AASGFTFSSFAMGWVRQAPGKGLEWVSGISFGGGTTYYADSVKGRFTISRDNSKNTLYLQMDSLRGEDTALYYCAKGADGYSSGGSRGYFDYWGLGALVIVSS

SEQ ID NO: 28683 - protein, 103 aa, Homo sapiens
AASGFTFTSYAMGWVRQAPGKGLEWVSGISFGGGTTYYADSVKGRFTISRDNSKNTLYLQMDSLRGEDTALYYCAKGADGYSSGGSRGYFDYWGQGALVIVSS

SEQ ID NO: 28684 - protein, 93 aa, Homo sapiens
TVSGGSISSYYWSWIRQSPAQGLEWIGYISYRGDIKYNPSLMSRVTMSIDTSKKQVSLKLTSVTAADTAVYYCAGGSPDFVCWGLGTLVTVSS

SEQ ID NO: 28685 - protein, 93 aa, Homo sapiens; identical to SEQ ID NO: 28684

SEQ ID NO: 28686 - protein, 99 aa, Homo sapiens
ASGYTFTTYGISWVRQAPGQGLEWMGWISGNNGNTNYAQKFQGRVTMTTDTSTSTVYMELRSLRSDDTAVYYCARTRLHCGGDCSPGHWGQGTLVTVSS

SEQ ID NO: 28687 - protein, 99 aa, Homo sapiens
ASGYTFTTYGISWVRQAPGQGLEWMGWISGNNGNANYAQKFQGRVTMTTDTSTSTVYMELRSLRSDDTAVYYCARTRLHCGGDCSPGHWGQGTLVTVSS

SEQ ID NO: 28688 - protein, 99 aa, Homo sapiens; identical to SEQ ID NO: 28687

SEQ ID NO: 28689 - protein, 96 aa, Homo sapiens
AAYGITFSASGMHWVRQTPGKGLEWVAFISYDGTKKYYRDSVEGRFTISRDDSKNTIYLQMNSLGTEDTALYYCAKDKGNYYFDYWGQGTLITVSS

SEQ ID NO: 28690 - protein, 96 aa, Homo sapiens; identical to SEQ ID NO: 28689

SEQ ID NO: 28691 - protein, 96 aa, Homo sapiens
AAYGITFSASGMHWVRQAPGKGLEWVAFISSDGRNKYYRDSVEGRFTISRDNSKNTIYLQMNSLRTEDTALYFCAKDKGNYYFDYWGQGTLITVSS

SEQ ID NO: 28692 - protein, 94 aa, Homo sapiens
AASGFSFSTYWMSWVRQAPGKGLEWVANIKQDGSEKFYVDSVKGRFTISRDNAKNSLFLQMNSLRAEDTAVYYCTRGATWVDCWGQGTLVNVSS

SEQ ID NO: 28693 - protein, 94 aa, Homo sapiens
AASGFSFSSYWMSWVRQAPGKGLEWVANIKQDGSEKFYVDSVKGRFTISRDNAKNSLFLQMNSLSAEDTAVYYCTRGATWVDCWGQGTLVNVSS

SEQ ID NO: 28694 - protein, 94 aa, Homo sapiens; identical to SEQ ID NO: 28693

SEQ ID NO: 28695 - protein, 99 aa, Homo sapiens
VASGFTFSSYGMYWVRQAPGKGLEWVAGTWYDGSNRNYADSVKGRFTISRDNSKNTLNLQMDSLRVEDTGLYYCVRDGIRGDDDAFDMWGQGTMVTVSS

SEQ ID NO: 28696 - protein, 99 aa, Homo sapiens
AASGFTFSSYGMYWVRQAPGKGLEWVAGSWSDGSNRNYADSVKGRFTISRDNSKSTLNLQMDSLRAEDTAVYYCVRDGIRGDDDAFDMWGQGTMVIVSS

SEQ ID NO: 28697 - protein, 110 aa, Homo sapiens
TQTLTLTCTFSGFSLSTSGVGVGWVRQSPGKALEWLALIYWDDDRRYSPSLRSRLTITKDTSKNQVVLTMTNMYPVDTATYYCAHRRGGHDWNAGWFAPWGQGTLVTVSS

SEQ ID NO: 28698 - protein, 108 aa, Homo sapiens
TQTLTLTCTFSGFSLSTSGVGVGWVRQSPGKALEWLALIYWDDDRRYSPSLRSRLTITKDTSKNQVVLTMTNIVDTATYYCAHRRGGHDWNAGWFAPWGQGTLVTVSS

SEQ ID NO: 28699 - protein, 110 aa, Homo sapiens
TQTLTLTCTFSGFSLSTSGVGVGWVRQSPGKALEWLALIYWDDDRRYSPSLTSRLTITKDTSKNQVVLTMTNMFPVDTATYYCAHRRGGHDWNAGWFAPWGQGTLVTVSS

SEQ ID NO: 28700 - protein, 108 aa, Homo sapiens
TQTLTLTCTFSGFSLSTNGVGVGWVRQSPGKALEWLALIYWDDDRRYSPSLRSRLTITKDTSKNQVVLTMTNIVDTATYYCAHRRGGHDWNAGWFAPWGQGTLVTVSS

SEQ ID NO: 28701 - protein, 110 aa, Homo sapiens
TQTLTLTCTFSGFSLSTNGVGVGWVRQSPGKALEWLALIYWDDDRRYTLSLRSRLTITKDTSKNQVALTMTNMYPVDTATYYCAHRRGGHDWNAGWFAPWGQGTLVTVSS

SEQ ID NO: 28702 - protein, 93 aa, Homo sapiens
AASGFTLSNYWMVWVRQVPGKGLMWVSRIKGDGSGISYADSVKGRFTISRDDAKNTLYLQMDSLRVEDTAVYYCARDRYGDYWGQGILVTVSS

SEQ ID NO: 28703 - protein, 93 aa, Homo sapiens
AASGFTLSNYWMVWVRQVPGKGLMWVSRIKSDGSGITYADSVKGRFTISRDDAKNTLYLQMDSLRVEDTAVYYCARDRYGDYWGQGILVTVSS

SEQ ID NO: 28704 - protein, 93 aa, Homo sapiens
AASGFTLSNYWMVWVRQVPGKGLMWVSRIKSDGSGISYADSVKGRFTISRDDAKNTLYLQMDSLRVEDTAVYYCARDRYGDYWGQGILVTVSS

SEQ ID NO: 28705 - protein, 98 aa, Homo sapiens
SASGFTFSSYAMHWVRQAPGKGLEYVSAISSNGGSTYYADSVKGRFTISRDNSKNTLYLQMSSLRAEEDTAVYYCVRSDQLAGAFDIWGQGTMVTVSS

SEQ ID NO: 28706 - protein, 97 aa, Homo sapiens
SASGFTFSSYAMHWVRQAPGKGLEYVSAISSNGGSTYYADSVKGRFTISRDNSKNTLYLQMSSLRAEDTAVYYCVRSDQLAGAFDIWGQGTMVTVSS

SEQ ID NO: 28707 - protein, 97 aa, Homo sapiens; identical to SEQ ID NO: 28706

SEQ ID NO: 28708 - protein, 97 aa, Homo sapiens; identical to SEQ ID NO: 28706

SEQ ID NO: 28709 - protein, 95 aa, Homo sapiens
AASGFTFSNNDMSWVRQAPGKGLEWVSAISPSGGTTYADSVKGRFTISRENSKNTLYLHTNSLRAEDTAVYYCAKVRGRWYFDAWGQGTLATVSS

SEQ ID NO: 28710 - protein, 95 aa, Homo sapiens
AASGFTFSNNDMSWVRQAPGKGLEWVSAISPSGGTTYADSVKGRFTISRENSKNTLYLHTSSLRAEDTAVYYCAKVRGRWYFDAWGQGTLATVSS

SEQ ID NO: 28711 - protein, 95 aa, Homo sapiens; identical to SEQ ID NO: 28709

SEQ ID NO: 28712 - protein, 95 aa, Homo sapiens; identical to SEQ ID NO: 28710

SEQ ID NO: 28713 - protein, 99 aa, Homo sapiens
ASGYTFVSYGLNWVRQAPGQGLEWVGWISGSNGNTKYAQKVQGRVTMTTDTSARTAYMELRSLRSDDTAVYYCARGSVQFSDYYYMDVWGTGTTVTVSS

SEQ ID NO: 28714 - protein, 99 aa, Homo sapiens
ASGYTFGSYGLNWVRQAPGQGLEWVGWISGSNGNTKYAQKVQGRVTMTTDTSARTAYMELRSLRSDDTAVYYCARGSVQFSDYYYMDVWGTGTTVTVSS

SEQ ID NO: 28715 - protein, 103 aa, Homo sapiens
TVSGGSISSRSYYWAWIRQPPGKGLEWIASIYYSGSTYYNPSLKSRVTISIDTSKNQFSLRLNSVTAADTAVYYCARHASSYSGSYRNYFDYWGQGTLVTVSS

SEQ ID NO: 28716 - protein, 103 aa, Homo sapiens
TVSGGSISNINYYWAWMRQPPGKGLEWIASIYYSGSTYYNPSLNSRVTISVDVSKNQFSLKLSSVTAADTAVFYCARHASSYSGSYRNYFDYWGQGTLVTVSS

SEQ ID NO: 28717 - protein, 103 aa, Homo sapiens
TVSGGSISDRSYYWAWIRQPPGKGLEWIASIYYSGVTYYNPSLESRVSIFVDTSKNQFSLRLNSATAADAAVYYCARHASSYSGSYRNYFDYWGQGTLVTVSS

SEQ ID NO: 28718 - protein, 103 aa, Homo sapiens
ASGFTFTSYGFTWVRQAPGQGLERMGWISAHNGNTNYAENLQGRITMTTDTPTRTVYMELRSLRSDDTAMYYCARVGGPVLRFLDWLGYMDVWGQGTTVTVSS

SEQ ID NO: 28719 - protein, 102 aa, Homo sapiens
ASGFTFTSYGFTWVRQAPGQGLERMGWISAHNGNTNYAQSLQGRITMTIDTSTSTVYMELRSLRSDDTAMYYCARVGGPVLRFLDWLGYMDVWGQGTTVTVS

SEQ ID NO: 28720 - protein, 103 aa, Homo sapiens
ASGFTFTSYGFTWVRQAPGQGLERMGWISAYNGNTDYAQSLQGRITITTDTSTRTVYMELRSLRSDDTAIYYCARVGGPVLRFLDWLGYMDVWGQGTTVTVSS

SEQ ID NO: 28721 - protein, 103 aa, Homo sapiens
ASGFTFTSYGFTWVRQAPGQGLERMGWISAHNGNTNYAESLQGRITMTTDTSTRTVYMELRSLRSDDTAMYYCARVGGPVLRFLDWLGYMDVWGQGTTVTVSS

SEQ ID NO: 28722 - protein, 103 aa, Homo sapiens
ASGFTFTSYGFTWVRQAPGQGLERMGWISAYNGNTNYAQSLQGRITLTTDTSTSTVYMELRSLRSDDTAMYYCARVGGPVLRFLDWLGYMDVWGQGTTVTVSS

SEQ ID NO: 28723 - protein, 102 aa, Homo sapiens
SGFTFTSYGFTWVRQAPGQGLERMGWISAYNGNTNYAQSLQGRITMTTDTPTSTVYMELRSLRSDDTAIYYCARVGGPVLRFLDWLGYMDVWGQGTTVIVSS

SEQ ID NO: 28724 - protein, 103 aa, Homo sapiens
ASGFTFTSYGFTWVRQAPGQGLERMGWISAHNGNTNYAQSLQGRITMTTDTSTRTVYMELRSLRSDDTAMYYCARVGGPVLRFLDWLGYMDVWGQGTTVTVSS

SEQ ID NO: 28725 - protein, 102 aa, Homo sapiens
ASGFTFTSYGFTWVRQAPGQGLERMGWISAHNGNTNYAQSLQGRITMTMDTSTSTVYMELRSLRSDDTAMYYCARVGGPVLRFLDWLGYMDVWGQGTTVTVS

SEQ ID NO: 28726 - protein, 102 aa, Homo sapiens; identical to SEQ ID NO: 28725

SEQ ID NO: 28727 - protein, 102 aa, Homo sapiens
ASGFTFTSYGFTWVRQAPGQGLERMGWISAYNGNTNYAQSLQGRITITTDTSTSTVYMELRSLRSDDTAMYYCARVGGPVLRFLDWLGYMDVWGQGTTVTVS

SEQ ID NO: 28728 - protein, 101 aa, Homo sapiens
ASGYTFTRYYMHWVRQAPGQGLEWMGIINPYDATTSYAQRFQGRVTMTSDTSTSTFYMDLSSLRSEDTAVYYCGRASERYCSRTSCYPDYWGQGTLVTVSS

SEQ ID NO: 28729 - protein, 101 aa, Homo sapiens
ASGYTFTRYYMHWVRQAPGQGLEWMGIINPSDGTTAYAQKFQGRVTVTRDTSTSTVYMDLSSLRSEDTAVYYCGRASERYCSRTSCYPDYWGQGTLVTVSS

SEQ ID NO: 28730 - protein, 101 aa, Homo sapiens
ASGYTFTTYYMHWVRQAPGQGLEWMGIINPFDDTTSYAQKFQGRVTMTRDTSTSTFYMDLSSLASEDTAVYYCGRASERYCSRTSCYPDYWGQGTLVTVSS

SEQ ID NO: 28731 - protein, 101 aa, Homo sapiens
ASGYTFTSYYIHWVRQAPGQGLEWMGIINPSDHTTSYAQKFQGRVTMTRDTSTSTVYMDLSSLRSEDTAVYYCGRASERYCSRTSCYPDYWGQGTLVTVSS

SEQ ID NO: 28732 - protein, 101 aa, Homo sapiens
ASGYTFTRYFMHWVRQAPGQGLEWMGIINPYDATTSYAQRFQGRVTMTSDTSTSTFYMDLSSLRSEDTAVYYCGRASERYCSRTSCYPDYWGQGTLVTVSS

SEQ ID NO: 28733 - protein, 100 aa, Homo sapiens
ASGYTFTRYYMHWVRQAPGQGLEWMGIINPYDATTSYAQRFQGRVTMTSDTSTSTFYMDLSSLRSEDTAVYYCGRASERYCSRTSCYPDYWGQGTPVTVS

SEQ ID NO: 28734 - protein, 99 aa, Homo sapiens
AASGFRFINYWMSWFRQAPGRGLEWLANIKQDGSETYYVDSVKGRFTISRDNAKNSLYVQLNSLTVEDTAVYYCARDREYGGSHPIDHWGQGTLVSVSS

SEQ ID NO: 28735 - protein, 98 aa, Homo sapiens
AVSGFRFRNYWMSWFRQAPGKGLEWLGNIKQDGSETYYMESVEGRFIISRDNAKYSLYVQLNSLTVEDTAVYYCARDREYGGSHPIDHWGPGTLVTVS

SEQ ID NO: 28736 - protein, 112 aa, Homo sapiens
TQTLALTCTFSGFSLSTSGVGVGWIRQPPGKALEWLAFIYWDDDKRYSPSLRTRLTITKDTSKNQVVLTMTTMDPVDTATYYCAHRLSGHSGGWDAGYLDFWGPGTLVTVSS

SEQ ID NO: 28737 - protein, 112 aa, Homo sapiens
TQTLALTCTFSGFSLSTSGVGVGWIRQPPGKALEWLAFIYWDDDKRYSPSLRTRLTITKDTSKNQVVLTMTTMDPVDTATYYCAHRLSGHSGGWDAGYLDFWGQGTLVTVSS

SEQ ID NO: 28738 - protein, 112 aa, Homo sapiens; identical to SEQ ID NO: 28737

SEQ ID NO: 28739 - protein, 112 aa, Homo sapiens; identical to SEQ ID NO: 28736

SEQ ID NO: 28740 - protein, 112 aa, Homo sapiens
TQTLALTCTFSGFSLSTSGVGVGWIRQPPGKALEWLAFIYWDDDKRYSPSLRTRLTITKDTSKNQVVLTMTTMDPVDTATYYCAHRLSGHSGGWDAGYLDFWGQGILVTVSS

SEQ ID NO: 28741 - protein, 112 aa, Homo sapiens
TQTLALTCTFSGFSLSTNGVGVGWIRQPPGKALEWLAFIYWDDDKRYSPSLRTRLSISKDTSKNQVVLTMTTMDPVDTATYYCAHRLSGHSGGWDAGYLDFWGPGTLVTVSS

SEQ ID NO: 28742 - protein, 106 aa, Homo sapiens
AASGFSFSSYEMIWVRQAPGKGLEWVSYISGSGTTIYYADSVKGRFAISRDNAKNSLYLQMSILRAEDTAIYYCARGGSGSSSSWNYYYYYYMDVWGKGTTVTVSS

SEQ ID NO: 28743 - protein, 106 aa, Homo sapiens
AASGFTFNSYEMNWVRQAPGKGLEWVSYISGSGSIIYYADSVKGRFFISRDNAKNSLYLQVNNLTAEDTAVYYCARGGSGSSSSWNYYYYYYMDVWGKGTTVTVSS

SEQ ID NO: 28744 - protein, 106 aa, Homo sapiens; identical to SEQ ID NO: 28743

SEQ ID NO: 28745 - protein, 100 aa, Homo sapiens
ASGFTFGSYGMSWVRQAPGKGLEWVSGFSGSGTSTYYAASVKGRFTISRDRSTNTLYLQMNSLRAEDTAVYFCAKDLSSYIPTAGSFDYWGRGTLVTVSS

SEQ ID NO: 28746 - protein, 100 aa, Homo sapiens
ASGFTFSSYGMSWVRQAPGKGLEWVSGFSGSGTSTYYAASVKGRFTISRDRTRNTLYLQMNSLRAEDTAVYYCAKDLSSYIPTAGSFDYWGRGTLVTVSS

SEQ ID NO: 28747 - protein, 100 aa, Homo sapiens
ASGFTFGSYGMSWVRQAPGKGLEWVSGFSGSGTSTYYAASVKGRFTISRDRSTNTLYLQMNSLRADDTAVYFCAKDLSSYIPTAGSFDYWGRGTLVTVSS

SEQ ID NO: 28748 - protein, 115 aa, Homo sapiens
TQTLTLTCTFSGFSLSTTGVGVGWIRQPPGKALEWLALIYWDDDKRYSPSLKSRLTITKDTSKNLVVLTMTNVDPVDTASYYCAHRQDGSCTPTRCNTHWGFDYWGQGALVTVSS

SEQ ID NO: 28749 - protein, 115 aa, Homo sapiens
TQTLTLTCTFSGFSLSTSGVGVGWIRQPPGKALEWLALIYWDDDKRYSPSLKSRLTIAKDTSKNLVVLIMTNMDPVDTASYYCAHRQDGSCTPTRCNTHWGFDYWGQGALVTVSS

SEQ ID NO: 28750 - protein, 115 aa, Homo sapiens
TQTLTLTCTFSGFSLSTSGVGVGWIRQPPGKALEWLALIYWDDDKRYSPSLKSRLTITKDTSKNLVVLIMTNMDPVDTASYYCAHRQDGSCTPTRCNTHWGFDYWGQGALVTVSS

SEQ ID NO: 28751 - protein, 115 aa, Homo sapiens
TQTLTLTCTFSGFSLSTTGVGVGWIRQPPGKALEWLALIYWDDDKRYSPSLKSRLTITKDTSKNLVVLIMTNVDPVDTASYYCAHRQDGSCTPTRCNTHWGFDYWGQGALVTVSS

SEQ ID NO: 28752 - protein, 107 aa, Homo sapiens
AVSGRRFTDLWMTWVRQGPGKGLEWVARIKGEEDGESKDYAERVKGRFSISRDESRRTVYLQMNNLQVDDSAVYYCCTGDVDYGSGRHYPANYFDTWGQGTRVLVSS

SEQ ID NO: 28753 - protein, 107 aa, Homo sapiens; identical to SEQ ID NO: 28752

SEQ ID NO: 28754 - protein, 101 aa, Homo sapiens
AASGFTFSSYGMHWVRQAPGKGLEWVAVISYDGSYTSYADSVKGRFTISRDNSKNTLFLEMNSLRAEDTAVYYCAKDQHLVLYWWDAFDIWGQGTMVTVSS

SEQ ID NO: 28755 - protein, 100 aa, Homo sapiens
ASGFNFGTYGMHWVRQAPGKGLEWVAVISYDGSYKSYAESVEGRFTISRDDSKNTLSLQMKSVRDEDTAVYFCAKDQHLVLYWWDAFDIWGRGTLVTVSS

SEQ ID NO: 28756 - protein, 100 aa, Homo sapiens
ASGFNFRNYGMHWVRQAPGKGLEWVAVISYDGSYKSYAESVEGRFTISRDNSKNTLSLQMKSVRDEDTAVYYCAKDQHLVLYWWDAFDIWGRGTLVTVSS

SEQ ID NO: 28757 - protein, 103 aa, Homo sapiens
AASGFAFDDYGMSWVRQAPGKGLEWVSAISGGGDSTFYADSVKGRFTISRDNSKNTLFLQMNSLRAEDTALYYCAKQHYYDILTGYYYYFESWGQGTLVTVSS

SEQ ID NO: 28758 - protein, 103 aa, Homo sapiens
AASGFAFDDYGMSWVRQAPGKGLEWVAAISGGGDSTFYADSVKGRFTISRDNSKNTLFLQMNSLRAEDTALYYCAKQHYYDILTGYYYYFESWGQGTLVTVSS

SEQ ID NO: 28759 - protein, 95 aa, Homo sapiens
AASGFTFRAYWMSWVRQAPGKGLEWVANIKGDGSLKSYVDSVKGRFTISRDNTKETLSLQMNSLGDEDTAVYHCVREDLYAFEIWGQGTKVTVSS

SEQ ID NO: 28760 - protein, 95 aa, Homo sapiens
AASGFTFSAYWMSWVRQAPGKGLEWVANIKQDGSMKTYVDSVKGRFTISRDNTKETMYLQMNSLGDEDTALYYCVREDLYAFEIWGQGTKVTVSS

SEQ ID NO: 28761 - protein, 95 aa, Homo sapiens
AASGFTFRLYWMSWVRQAPGKGLEWVANIKEDGSRKTYVDSVRGRFTISRDNTKETMYLQMNSLGDEDTAVYYCVREDLYAFEIWGQGTKVTVSS

SEQ ID NO: 28762 - protein, 95 aa, Homo sapiens; identical to SEQ ID NO: 28761

SEQ ID NO: 28763 - protein, 95 aa, Homo sapiens
AASGFTFRLYWMSWVHQAPGKGLEWVANIKEDGSRKTYVDSVRGRFTISRDNTKETMYLQMNSLGDEDTAVYYCVREDLYAFEIWGQGTKVTVSS

SEQ ID NO: 28764 - protein, 95 aa, Homo sapiens
AASGFTFSGYWMSWVRQAPGKGLEWVANIKPDGSLKDYVDAVKGRFTISRDNTKETLYLLMNSLGDEDTAVYHCVREDLYAFEIWGQGTKVTVSS

SEQ ID NO: 28765 - protein, 95 aa, Homo sapiens
AASGFTFSVYWMSWVRQAPGKGLEWVANIKEDGSRKTYVDSVKGRFTISRDNTKETMYLQMNSLGDEDTAVYYCVREDLYAFEIWGQGTKVTVSS

SEQ ID NO: 28766 - protein, 95 aa, Homo sapiens
EASGFTFRGYWMSWVRQAPGKGLEWVANIKQDGSMKSYVDSVKGRFTISRDNTKETLFLQMNSLGDEDSAVYYCVREDLYAFEIWGQGTKVIVSS

SEQ ID NO: 28767 - protein, 95 aa, Homo sapiens; identical to SEQ ID NO: 28761

SEQ ID NO: 28768 - protein, 95 aa, Homo sapiens; identical to SEQ ID NO: 28761

SEQ ID NO: 28769 - protein, 99 aa, Homo sapiens
ASGYSFSNYGITWVRQAPGQGLEWMGWISAYNGHTRFAQKFQGRVTMTTDASTSTAYMELRSLRSDDTAVYYCARDFMIFGEIFRFDPWGQGTLVTVSS

SEQ ID NO: 28770 - protein, 99 aa, Homo sapiens
ASGYTFTNYGITWVRQAPGQGLEWMGWISAYNGHTRFAQKFQGRVTMTTNTSTSTAYMELRSLTSDDTAVYYCARDFMIFGEIFRFDPWGQGTRVTVSS

SEQ ID NO: 28771 - protein, 101 aa, Homo sapiens
KGSGYSFTSYWITWVRQMPGKGLEWMGRIDPSDSSTNYSPSFRGHVTISADKSISTAYLQWSSLKASDTAMYYCARPPTWNYFPNDAFDVWGQGTMVTVSS

SEQ ID NO: 28772 - protein, 101 aa, Homo sapiens; identical to SEQ ID NO: 28771

SEQ ID NO: 28773 - protein, 101 aa, Homo sapiens
KGSGYSFTSYWITWVRQMPGKGLEWMGRIDPSDSSTNYSPSFRGHVTISADKSISTAYLQWSSLKASDTAMYYCARPPTWNYFPNDAFDVWGQGTMVIVSS

SEQ ID NO: 28774 - protein, 98 aa, Homo sapiens
AASAFTFSSYAMSWVRQSPGKGLEWVSTVSTSGAGTYYAVSVKGRFTISRDNSKNTLYLQMNSLRAEDTAVYYCAKDRGSGWYYFDDWGQGTLVTVSS

SEQ ID NO: 28775 - protein, 98 aa, Homo sapiens
AASAFTFSSYAMSWVRQSPGKGLEWVSTVSTSGAGTYYAVSVKGRFTISRDNSKNTLYLQMNSLRAEDTAVYYCAKDRGSGWYYFDDWGQGTLVTVFS

SEQ ID NO: 28776 - protein, 98 aa, Homo sapiens; identical to SEQ ID NO: 28774

SEQ ID NO: 28777 - protein, 98 aa, Homo sapiens; identical to SEQ ID NO: 28774

SEQ ID NO: 28778 - protein, 93 aa, Homo sapiens
AASGFTFKDYYMTWIRQVKGKGLEWISFIDYGGHANYAESVNGRFSVSRDNDRATLYLDMSGLRLDDTATYYCGRGHWGPDSWGQGTLVTVSS

SEQ ID NO: 28779 - protein, 93 aa, Homo sapiens
AASGFRFNDYYMTWIRQGAGKGLEWISFIDYTGHADYADSVNGRFSVSRDNERDTFYLHMNALRVDDTGTYYCGRGHWGPDSWGQGTLVTVSS

SEQ ID NO: 28780 - protein, 98 aa, Homo sapiens
TVSGDSMSIYYWSWVRQPPGKGLEWIAYISYSGSATYSPSLKSRVTILIDTSKNQFSLKLRSVTAADTAVYYCARRSTTGSTRWFDPWGQGTLVTVSS

SEQ ID NO: 28781 - protein, 98 aa, Homo sapiens
TVSGDSMGVYYWSWVRQPPGKGLEWIAYISYSGSATYSPSLKSRVTILIDTSNNQFSLKLRSVTAADTAVYYCARRSTTGSTRWFDPWGQGTLVTVSS

SEQ ID NO: 28782 - protein, 96 aa, Homo sapiens
AASGFTFSDYWIHWVRQAPGKGLVWVSRINNDGRDTIYADSVRGRFTCSRDNRKNTLYLTMNSLRVDDTAVYYCARGGFSHSFDSWGQGTVVTVSS

SEQ ID NO: 28783 - protein, 96 aa, Homo sapiens
AASGFTFSDYWIHWVRQAPGKGLMWVSRINNDGSDTIYADSVRGRFTCSRDNAKNTLYLTMNSLRDDDTAVYYCARGGFSHSFDSWGQGTVVTVSS

SEQ ID NO: 28784 - protein, 108 aa, Homo sapiens
AASGFTFTNAWMTWVRQAPGKGLDWVGRLKSETDGGTADYAAPVKGRFTISRDDSKNTLYLQMNSLEIEDTAIYYCTTVEDFWSGYYYPTPHRPVDYWGQGTLVTVSS

SEQ ID NO: 28785 - protein, 108 aa, Homo sapiens; identical to SEQ ID NO: 28784

SEQ ID NO: 28786 - protein, 108 aa, Homo sapiens
AASGFTFTNAWMTWVRQAPGKGLEWVGRIKSETDGGTADYAAPVKGRFTISRDDSKNTLYLQMNSLEIEDTAVYYCTTVEDFWSGYYYPTPHRPVDYWGQGTLVTVSS

SEQ ID NO: 28787 - protein, 108 aa, Homo sapiens
AASGFTFTNAWMTWVRQAPGKGLDWVGRLKSETDGGTADYAAPVKGRFTISRDDSKNTLYLQMNSLEIEDTAIYYCTTVEDFWSGYYYPTPHRPVDYWGQGTLVTASS

SEQ ID NO: 28788 - protein, 95 aa, Homo sapiens
AGSGFTLTNVWIRWIRQAPGKGLEWIGRIKSKADGGTTDYAAPVKGRFTISRDDSKNTLYLQMNSLKTEDTAVYYCFTDRSLGYWGQGTLVTVSS

SEQ ID NO: 28789 - protein, 95 aa, Homo sapiens; identical to SEQ ID NO: 28788

SEQ ID NO: 28790 - protein, 95 aa, Homo sapiens
AGSGFALTNVWIRWVRQAPGKGLEWIGRIKSMAEGGTTDYAAPVKGRFTISRDDSKNTLYLQMNSLKIDDTAVYYCFTDRSLGYWGQGTLVTVSS

SEQ ID NO: 28791 - protein, 97 aa, Homo sapiens
TVSGDSVSRHYLTWVRQSPGKGLEWIGYRYSTVNVQYNPSLKSRVSISVDTTENQSILRLSSVTAADTAVYYCARWNSYENFYLDTWGQGAPVTVSS

SEQ ID NO: 28792 - protein, 97 aa, Homo sapiens
TVSGDSVSRHYLSWVRQSPGKGLEWIGYRYSTVNVQYNPSLKSRVSISVDTTENQSILRLSSVTAADTAVYYCARWNSYENFYLDTWGQGAPVTVSS

SEQ ID NO: 28793 - protein, 102 aa, Homo sapiens
AGSGFTFSHFAMSWVRQAPGKGLEWVSSISGSGGYTYYADSVRGRFTISRDNSKNTLYLQMNSLRADDTAVYYCARDRLGATAGRGGWSDPWGQGTLVIVSS

SEQ ID NO: 28794 - protein, 102 aa, Homo sapiens
AGSGFIFSDYAMSWVRQAPGKGLEWVSAISGSGDSTYYAASVKGRFTISRDNSKKTLHLQMSSLGADDTAVYYCARDRLGATAGRGGWSDPWGQGTLVTVSS

SEQ ID NO: 28795 - protein, 99 aa, Homo sapiens
VASGFTFGSYGMHWVRQAPGKGLEWVAIIWFDGGKKYYTDSVRGRFTISRDNSKNTLYLQMNSLTAEDTAVYYCARDESTSGYYYMDVWGKGTTVTVSS

SEQ ID NO: 28796 - protein, 99 aa, Homo sapiens
AASGFTFSSYGMHWVRQAPGKGLEWVAIIWFDGGKKYYTDSVRGRFTISRDNSKNTLYLQMNSLTAEDTAVYYCARDESTSGYYYMDVWGKGTTVTVSS

SEQ ID NO: 28797 - protein, 99 aa, Homo sapiens; identical to SEQ ID NO: 28796

SEQ ID NO: 28798 - protein, 102 aa, Homo sapiens
ASGATFSNYAVSWVRQAPGQGLEWMGRVIPTLDVANYAQKFQGRLRITVDKSTTTAYMELSSLKSEDTAIYYCATGGYCSGARCFTDWFDPWGQGTLVTVSS

SEQ ID NO: 28799 - protein, 102 aa, Homo sapiens
ASGGTFSNYAVSWVRQAPGQGLEWMGRVIPTLDVANYAQKFQGRLRISVDKSTTTAYMELSSLKSEDTAIYYCATGGYCSGARCFTDWFDPWGQGTLVTVSS

SEQ ID NO: 28800 - protein, 101 aa, Homo sapiens
TVSGDSFNSTTYYWGWVRQPPGKGLEWITSVSYSGRPYYNPSLKSRATISVDTSKSQFSLKLSAVTAADTAVYYCARHLAEALPAGAVEYWGQGTLVTVSS

SEQ ID NO: 28801 - protein, 101 aa, Homo sapiens
TVSGDSFTSTTYYWGWVRQPPGKGLEWIASVSYSGITYYNPSLKSRATISVDTSRSQFSLNLSAVTAADTAVYFCARHLAEALPAGAVEYWGQGTLVTVSS

SEQ ID NO: 28802 - protein, 96 aa, Homo sapiens
SGYTFSNFAIHWVRQAPGQRPEWMGWINAAGNKSDYSQKFQDTVTIRRDTSANIVYMELSSLTSEDTAVYYCVRGVHAGAWLVDYWGPGTLLTVSS

SEQ ID NO: 28803 - protein, 96 aa, Homo sapiens
SGYTFSNFAIHWVRQAPGQRPEWMGWINAAGNKSDYSQKFRDTATIRRDTSASIVYMELSSLTSEDTAVYYCVRGVHAGAWLVDYWGPGTLLTVSS

SEQ ID NO: 28804 - protein, 96 aa, Homo sapiens
SGYTFSNFAIHWVRQAPGQRPEWMGWINAAGNKSDYSQKFQDTATIRRDTSANIVYMELSSLTSEDTAVYYCVRGVHAGAWLVDYWGPGTLLTVSS

SEQ ID NO: 28805 - protein, 97 aa, Homo sapiens
AASGFSFSFYPMSWVRQAPGKGLEWVSAVSNSGANTYYSDSVKGRFTISRDNSKNTVYLQMNSLRAEDTAVYYCAKEIPVDVSFDYWGQGTLVTVSS

SEQ ID NO: 28806 - protein, 97 aa, Homo sapiens
AASGFSFSSYPMSWVRQAPGKGLEWVSAISNSGADTYYSDSVKGRFTISRDNSKNTVYLQMNSLRAEDTAVYYCAKEIPVDVSFDYWGQGTLVTVSS

SEQ ID NO: 28807 - protein, 97 aa, Homo sapiens
AASGFSFSTYPMSWVRQAPGKGLEWVSAISNSGGETFYSDSVKGRFTVSRDNSKNTVFLQLNSLRAEDTAIYYCAKEIPVDVSFDYWGQGTLVTVSS

SEQ ID NO: 28808 - protein, 97 aa, Homo sapiens
AASGFSFSTYPMSWVRQAPGKGLEWVSAISKSGADTYYSDSVKGRFTISRDNSKNTVDLHLNSLRAEDTAVYYCAKEIPVDVSFDYWGRGTLVTVSS

SEQ ID NO: 28809 - protein, 95 aa, Homo sapiens
ASGYSFTHYLLHWVRQAPGQGLEWMGVINPGNRDTVYPLNFQGRVSMTRDTSTSTVYMELSSLRYDDTAVYYCAREESGGRWDYWGQGSPVTISS

SEQ ID NO: 28810 - protein, 95 aa, Homo sapiens
ASGYSFTHYLLHWVRQAPGQGLEWMGIINPGNGDTIYVLNFQGRVSMTRDTSTSTVYMELSSLRYDDTAVYYCAREESGGRWDYWGQGSPVTISS

SEQ ID NO: 28811 - protein, 104 aa, Homo sapiens
AASGFTLSNYWMSWVRQAPGKGLEWVANINQDGSEQDYVDSVKGRFTISRDNAKNSLFLQMNSLRAEDTAVYYCARTQERFLEWAMIPLHFDYWGQGTLVTVSS

SEQ ID NO: 28812 - protein, 104 aa, Homo sapiens
AASGFTFSNYWMSWVRQAPGKGLEWVANIKQDGSEKDYVDSVKGRFTISRDNAKNSLFLQMNSLRAEDTAVYYCARTQERFLEWAMIPLHFDYWGQGTLVTVSS

SEQ ID NO: 28813 - protein, 110 aa, Homo sapiens
AASGLTFSNYGFHWVRQTPDKGLEWVAVISYDGRDKYYSESVKGRFTISRDNSKNTLYLQMDSPRAEDTAVYYCAKIFSRDCTSTTCYLSRGYHYYMDVWGKGTTVTVSS

SEQ ID NO: 28814 - protein, 110 aa, Homo sapiens
AASGLTFRNYGFHWVRQTPDKGLEWVAVISYDGGDKYYSESVKGRFTISRDNSKNTLYLQMDSPRAEDTAVYYCAKIFSRDCTSTTCYLSRGYHYYMDVWGKGTTVTVSS

SEQ ID NO: 28815 - protein, 110 aa, Homo sapiens
AASGLTFSNYGFHWVRQTPDKGLEWVAVISYDGRDKYYSESVRGRFTISRDNSKNTLYLQMDSPRAEDTAVYYCAKIFSRDCTSTTCYLSRGYHYYMDVWGKGTTVTVSS

SEQ ID NO: 28816 - protein, 109 aa, Homo sapiens
ASGLTFSNYGFHWVRQTPDKGLEWVAVISYDGRDKYYSESVKGRFTISRDNSKNTLYLQMDSPRAEDTAVYYCAKIFSRDCTSTTCYLSRGYHYYMDVWGKGTTVTVSS

SEQ ID NO: 28817 - protein, 108 aa, Homo sapiens
SVSGDSIRNYYWSWVRQPPGKRLEWLGYIYYRETTVYNPSLQGRVTISVDMSKNQISLEVKSVSAADTAVYYCARDLREKVEGLRRGYYYSHQHMDVWGKGTTVTVSS

SEQ ID NO: 28818 - protein, 108 aa, Homo sapiens
SVSGDSIRSHYWSWIRQPPGKRLEWMGYIYYRETTVYNPSLQGRVTISVDTSKNQISLELRSVSAADAAVYYCARDLREKVEGLRRGYYYSHQHMDVWGKGTTVTVSS

SEQ ID NO: 28819 - protein, 108 aa, Homo sapiens
SVSGDSIRNYYWSWVRQPPGKRLEWIGYIYYRETTIYNPSLQGRVTISVDMSKNQISLELKSVSAADTAVYYCARDLREKVEGLRRGYYYSHQHMDVWGKGTTVTVSS

SEQ ID NO: 28820 - protein, 102 aa, Homo sapiens
ATSGFTFSAAALHWVRQAPGKGLEWVGHIRSKPNNYLTEYGASVRRRFIISRDDSKNTAYLQMNNLKADDTAVYYCTLILVTATPYYYMDVWGRGTTVTVSS

SEQ ID NO: 28821 - protein, 102 aa, Homo sapiens
ETSGFTFSAAALHWVRQAPGKGLEWVGHIRSKPNNYLTEYGASVRRRFIISRDDSKNTAYLQMNNLKADDTAVYYCTLILVTATPYYYMDVWGRGTTVTVSS

SEQ ID NO: 28822 - protein, 99 aa, Homo sapiens
TVSGDSVNSNSYYWNWIRQPPGKGLEWIGYIYHSGTTKYNPSFKSRVTISLNTSKNQFSLKLNSVTAADTAVYYCATGVWNVQDWFDPWGQGTLVTVSS

SEQ ID NO: 28823 - protein, 99 aa, Homo sapiens
TVSGGSVNSGTYYWNWLRQPPGKGLEWIGYISYRGITKYNPSLKGRVTILLDTSQSQISLRLSSVTAADTAVYYCATGVWNVQDWFDPWGQGTLVTVSS

SEQ ID NO: 28824 - protein, 96 aa, Homo sapiens
AASGFTFGSYWMDWVRQAPGKGLEWVASIRTDATEKDYVDSVKGRFTISRDNAMNSMYLQMSSLRAEDTAVYYCVRDRGWGAFDYWGQGTLVTVSS

SEQ ID NO: 28825 - protein, 96 aa, Homo sapiens
AASGFTFGSYWMDWVRQAPGKGLEWVASIRTDATEKDYVDSVKGRFTISRDNAMNSLYLQMNSLRAEDTAVYYCVRDRGWGAFDYWGQGTLVTVSS

SEQ ID NO: 28826 - protein, 96 aa, Homo sapiens
AASGFTFGGYWMDWVRQAPGKGLEWVASIRTDALEKDYVDSVRGRFTISRDNARNSLYLQMNSLTAADTAVYFCVRDRGWGAFDYWGQGTLVTVSS

SEQ ID NO: 28827 - protein, 96 aa, Homo sapiens
ASGGTFNSYAINWVRQAPGQGLEWMGGIIPIFGTANYAQKFQGRVTITADESTSTAYMELSSLRSEDTAVYYCAILGGANAGVDYWGQGTLVTVSS

SEQ ID NO: 28828 - protein, 96 aa, Homo sapiens
ASGGTFNSYAINWVRQAPGQGLEWMGGIIPIFVTANYAQKFQGRVTITADESTSTAYMELSSLRSEDTAVYYCAILGGANAGVDYWGQGTLVTVSS

SEQ ID NO: 28829 - protein, 96 aa, Homo sapiens
ASGGTFNTYAINWVRQAPGQGLEWMGGIIPIFGTANYAQKFQGRVTITADESTSTAYMELSSLRSEDTAVYYCAILGGANAGVDYWGQGTLVTVSS

SEQ ID NO: 28830 - protein, 94 aa, Homo sapiens
SGFTFSSYWMTWVRQAPGKGLEWVANIDQGGSEKFYADSVKGRFAISRDNAKDSLYLEMNSLRLDDTALYYCASVFNSDGSDIWGQGTMVTVSS

SEQ ID NO: 28831 - protein, 94 aa, Homo sapiens
SGFTFSSYWMTWVRQAPGKGLEWVANVDQGGSEKFYADSVKGRFAISRDNAKDSLYLEMNSLRLEDTALYYCASVFNSDGSDIWGQGTMVTVSS

SEQ ID NO: 28832 - protein, 100 aa, Homo sapiens
TSAFTFSPYAISWVRQAPGKGLEWLSGISGSGGSTYYADSVKGRFTISRDNSKNTVYLQMNSLRADDTAVYYCAKVGVGLRFLEWFFDYWGQGTLVTVSS

SEQ ID NO: 28833 - protein, 100 aa, Homo sapiens
TSAFTFSPYAISWVRQAPGKGLEWLSGISGSGGSTYYADSVKGRFTISRDNSKNTVYLQMNSLRADDTAVYYCAKVGVGLRFLEWFFDYWGQGTLVTLSS

SEQ ID NO: 28834 - protein, 100 aa, Homo sapiens
ASGFTFKDYYMSWIRQAPGKGLEWVSQISSGASHTFYADSVRGRFTISRDDSKNSVYLHMSSLRVEDTALYYCTRERYFESSAFRWFDTWGQGSPVTVSS

SEQ ID NO: 28835 - protein, 100 aa, Homo sapiens; identical to SEQ ID NO: 28834

SEQ ID NO: 28836 - protein, 100 aa, Homo sapiens
ASGFTFKDYYMSWIRQAPGKGLEWVSQISSGASHTFYADSVRGRFTISRDDSKNSVYLHMSSLRVEDTALYFCTRERYFESSAFRWFDTWGQGSPVTVSS

SEQ ID NO: 28837 - protein, 103 aa, Homo sapiens
AASGFTFSSFAMSWVRQAPGKGLEWVSGISGSGGSTYYADSVKGRFTISRDNSKNTLYLQMNSLRAEDTAVYYCAKDLTNIVVVPALGDLDYWGQGTLVTVSS

SEQ ID NO: 28838 - protein, 103 aa, Homo sapiens
AASGFTFSSYAMSWVRQAPGKGLEWVSGISGSGGSTYYADSVKDRFTISRDNSKNTLYLQMNSLRAEDTAVYYCAKDLTNIVVVPALGDLDYWGQGTLVTVSS

SEQ ID NO: 28839 - protein, 103 aa, Homo sapiens
AASGFTFSSYAMSWVRQAPGKGLEWVSGISGSGGGTYYADSVKGRFTISRDNSKNTLYLQMNSLRAEDTAVYYCAKDLTNIVVVPALGDLDYWGQGTLVTVSS

SEQ ID NO: 28840 - protein, 103 aa, Homo sapiens; identical to SEQ ID NO: 28838

SEQ ID NO: 28841 - protein, 103 aa, Homo sapiens; identical to SEQ ID NO: 28837

SEQ ID NO: 28842 - protein, 103 aa, Homo sapiens
AGSGFTFSRYAMSWVRQAPEKGLEWVSAISGSGGSTYYADSVKGRFTISRDNSKNTLYLQMNSLRAEDTAVYYCAKDLTNIVVVPALGDLDYWGQGTLVTVSS

SEQ ID NO: 28843 - protein, 102 aa, Homo sapiens
ASGFTFSSYAMSWVRQAPGKGLEWVSGISGSGGSTYYADSVKGRFTISRDNSKNTLYVQMNSLRAEDTAVYYCAKDLTNIVVVPALGDLDYWGQGTLVTVSS

SEQ ID NO: 28844 - protein, 101 aa, Homo sapiens
VSGGSIGSDYWSWIRQPPGKGLEWIGYIYYTGSTNYNPSLKSRVTISVDTSKNHFSLKLTSVTAADTAVYYCARQDFVVVPTLIPNWLDPWGQGTLVTVSS

SEQ ID NO: 28845 - protein, 102 aa, Homo sapiens
TVSGGSIGSDYWSWIRQPPGKGLEWIGYIYYTGSTNYNPSLKSRVTISVDTSKNHFSLKLASVTAADTAVYYCARQDFVVVPTLIPNWLDPWGQGTLVTVSS

SEQ ID NO: 28846 - protein, 102 aa, Homo sapiens
TVSGGSIGSDYWSWIRQPPGKGLEWIGYIYYTGSTNYNPSLKSRVTISVDTSKNDFSLKLTSVTAADTAVYYCARQDFVVVPTLIPNWLDPWGQGTLVTVSS

SEQ ID NO: 28847 - protein, 102 aa, Homo sapiens
TVSGGSIGSDYWSWIRQPPGKGLEWIGYIYYTGSTNYNPSLKSRVTISVDTSKNHFSLKLTSVTAADTAVYYCARQDFVVVPTLIPNWLDPWGQGTLVTVSS

SEQ ID NO: 28848 - protein, 100 aa, Homo sapiens
AVSGGSISTNNWWSWVRQPPGKGLEWIGQIFHSGSTNYNPSLKSRVTISVDQSKNQFSLKLNSVTAADTAMYYCARDRKYDGRYYEDDYWGQGILVTVSS

SEQ ID NO: 28849 - protein, 100 aa, Homo sapiens
AVSGGSISTNNWWSWVRQPPGKGLEWIGQIFHSGSTNYNPSLKSRVTISVDQSKNQFSLKLNSVTAADTAMYYCARDRKYDGRYYEDDYWGQGILVTDSS

SEQ ID NO: 28850 - protein, 100 aa, Homo sapiens
TVSGASIRSHYWSWIRQPPGRGLEWIGYISSGGSTTYNPSLKSRVTIAEDTSKKQFSLKVTSVTAADTAVYYCVRGPGWVQSGYEGFDYWGQGTLVTASS

SEQ ID NO: 28851 - protein, 100 aa, Homo sapiens
TVSGASIRSHYWSWIRQPPGRGLEWIGYISSGGSTTYNPSLKSRVSIAEDTSKKQFSLKLTSMTAADTAVYYCVRGPGWVQSGYEGFDYWGQGTLVTASS

SEQ ID NO: 28852 - protein, 95 aa, Homo sapiens
TVSGDSVSRGKYYWSWIRQPPGKGLEWIGYIYSNGSTNYNPSLKSRVTISVDTSKNQFSLKLTSVTSSDTAVYYCARDAGDSGHWGQGTLITVSS

SEQ ID NO: 28853 - protein, 95 aa, Homo sapiens
TVSGGSVRRGSYYWSWIRQPPGKGLEWIGYIYFNGSTNYNPSLKSRVNLSVDTSKNQFSLKLSSVTAADTAVYYCARDAGDSGHWGQGTLVTVSS

SEQ ID NO: 28854 - protein, 95 aa, Homo sapiens
TVSGASARSGSHYWSWIRQPPGKGLEWIGYIYYNGTTNYNPSLKSRVTISVDTSKSQFSLNLISVTAADTAMYYCARDAGDSGHWGQGTLVTVSS

SEQ ID NO: 28855 - protein, 98 aa, Homo sapiens
ASGYTFTSYDVNWVRQATGQGLEWMGRMNPNRGNSAYAQKFQGRVTMTRNTSISTAYMELSGLRSEDTAVYYCARLSGNYLYNWFDPWGQGTLVTVSS

SEQ ID NO: 28856 - protein, 98 aa, Homo sapiens; identical to SEQ ID NO: 28855

SEQ ID NO: 28857 - protein, 98 aa, Homo sapiens; identical to SEQ ID NO: 28855

SEQ ID NO: 28858 - protein, 98 aa, Homo sapiens; identical to SEQ ID NO: 28855

SEQ ID NO: 28859 - protein, 98 aa, Homo sapiens; identical to SEQ ID NO: 28855

SEQ ID NO: 28860 - protein, 92 aa, Homo sapiens
AASGFTVSRNYISWVRQTPGKGLEWVSFIYGGYSTYYADSVKGRFTVSGDNSTNTVHLQMSSLRAEDTAVYYCARNRYFDLWGRGTLVTVSS

SEQ ID NO: 28861 - protein, 92 aa, Homo sapiens
AVSGFTISRNYINWVRQTPGKGLEWVSFIYGAYSTYYADSVKGRFTVSGDNSTNTVHLQMSSLRAEDTAVYYCARNRYFDLWGRGTLVTVSS

SEQ ID NO: 28862 - protein, 92 aa, Homo sapiens
AASGFTVSRNYISWIRQTPGKGLEWVSFIYGGYSTYYADSVKGRFTVSGDNSTNTVHLQMSSLRAEDTAVYYCARNRYFDLWGRGTLVTVSS

SEQ ID NO: 28863 - protein, 92 aa, Homo sapiens
AASGFTVSRNYINWVRQTPGKGLEWVSFIYGGYATYYADSVKGRFTISGDNSTNTVHLQMSSLRAEDTAVYYCARNRYFDLWGRGTLVTVSS

SEQ ID NO: 28864 - protein, 96 aa, Homo sapiens
EGSGFTFIEHGIHWVRQVPGRGLEWVSGIIWNTGRTGYADSVKGRFTVSRDYAKNSLSLQMNNLRVEDTALYYCVKDGGAGGAEYWGQGTLVTVSS

SEQ ID NO: 28865 - protein, 96 aa, Homo sapiens
AVSGFTSHDHGMHWVRQAPGKGLEWVSGIIWNSGTLGYADSVRGRFTISRDNAKDSLYLEMNSLRVEDTALYFCVKDGGAGGAEYWGQGTLVTVSS

SEQ ID NO: 28866 - protein, 97 aa, Homo sapiens
AASGFTFSSYALSWVRQAPGKGLEWVSTITETTYSTFYADSVKGRFTISRDNSKKTLYLQMNSLRAEDTAVYYCAKPDGVEQERDYWGQGTLVTVSS

SEQ ID NO: 28867 - protein, 97 aa, Homo sapiens
AASGFSFSSYTLSWVRQAPGKGLEWVSSITETTHSTIYADSVKGRFTISRDNSKKTLYLQMNSLRAEDTAVYYCAKPDGVEQERDYWGQGTLVTVSS

SEQ ID NO: 28868 - protein, 97 aa, Homo sapiens
AASGFTFSSYSLSWVRQAPGKGLEWVSTIAETTYSTFYADSVKGRFTISRDDSKKTLYLQMNSLRAEDTAVYYCAKPDGVEQERDYWGQGTLVTVSS

SEQ ID NO: 28869 - protein, 108 aa, Homo sapiens
AASGFMFSSYGMHWVRQAPGKGLEWVAVISFDGNNKYYEDSVKGRFTISRDDSRNTLYLQIDILRAEDTAVYYCAKDPNPFSSISPPITDGDNYMDVWGKGTTVTVSS

SEQ ID NO: 28870 - protein, 108 aa, Homo sapiens
AASGFMFSSYGMHWVRQAPGKGLEWVAVISFDGNKKYYEDSVKGRFTISRDASRNTLYLQIDMLRAEDTAVYYCAKDPNPFSSISPPITDGDNYMDVWGKGTTVTVSS

SEQ ID NO: 28871 - protein, 108 aa, Homo sapiens
AASGFIFSSYGMHWVRQAPGKGLEWVAVISFDGNNRYYEDSVKGRFTISRDDSKNTLYLQIDILRAEDTAVYYCAKDPNPFSSISPPITDGDNYMDVWGKGTTVTVSS

SEQ ID NO: 28872 - protein, 101 aa, Homo sapiens
ASGFTVSSNYMTWVRQAPGKGLEWVSLISSSGTTYYADSVKGRFTISRDYSKNTLYLQMNSLRAEDTAVYYCARVIRETSGWNHYSYMDVWGKGTTVSVSS

SEQ ID NO: 28873 - protein, 101 aa, Homo sapiens
ASGFTVSSNYMTWVRQAPGKGLEWVSLISSSGSTYYADSVKGRFTISRDNSKNTLYLQMNSLRAEDTAVFYCARVIRETSGWNHYSYMDVWGTGTTVSVSS

SEQ ID NO: 28874 - protein, 101 aa, Homo sapiens
ASGFTVSSNYMTWVRQAPGKGLEWVSLISSSGTTYYADSVKGRFTISRDNSKNTLYLQMNSLRAEDTAVYYCARVIRETSGWNHYSYMDVWGKGTTVSVSS

SEQ ID NO: 28875 - protein, 101 aa, Homo sapiens
ASGFTVTNNYMTWVRQAPGKGLEWVSLISSSGTTYYADSVKGRFTISRDNSKYTLYLQMSSLRVEDTAVYYCARVIRETSGWNHYSYMDVWGKGTTVSVSS

SEQ ID NO: 28876 - protein, 99 aa, Homo sapiens
AVSGGSFYSYYWTWIRQPPGKGLEWIGEVDHSGATRFNPSLKGRVTLSIDTSKNQFSLTLKSLIAADTAVYFCARGYRGSDRDDYFQYWGQGSLVTVSS

SEQ ID NO: 28877 - protein, 99 aa, Homo sapiens
AVSGGSFHSYYWTWIRQPPGKGLEWIGEVDHSGATRFNPSLKGRATLSIDTAKSEFSLTMKSLTAADTAVYFCARGYRGSDRDDYFQYWGQGSLVTVSS

SEQ ID NO: 28878 - protein, 99 aa, Homo sapiens
AVSGGSFHSYYWTWIRQPPGKGLEWIGEVDHSGATRFNPSLKGRVTLSIDTSKNQFSLTMKSLTAADTAVYFCARGYRGSDRDDYFQYWGQGSLVTVSS

SEQ ID NO: 28879 - protein, 99 aa, Homo sapiens
AVSGGSFHSYYWTWIRQSPGKGLEWIGEVDHSGATRFNPSLKGRATLSIDTAKSEFSLTMKSVTAADTAVYFCARGYRGSDRDDYFQYWGQGSLVTVSS

SEQ ID NO: 28880 - protein, 99 aa, Homo sapiens
AVSGGSFHSYYWTWIRQPPGKGLEWIGEVDHSGATRFNPSLKGRASLSIDTSKNQFSLTLKSLTAADTAVYFCARGYRGSDRDDYFQYWGQGSLVTVSS

SEQ ID NO: 28881 - protein, 94 aa, Homo sapiens
SGYTFIDQYIHWVRQAPGQGLEWMGWINPKNGGTNYAQKFQGWVTMTRDTSIRTAYMELIRLRSNDTAVYYCARGDVVTSTDYWGQGTLVTVSS

SEQ ID NO: 28882 - protein, 94 aa, Homo sapiens
SGYIFIDQYIHWVRQAPGQGLEWMGWINPKNGVPNYAQKFQGWVIMTRDTSIRTAYMELIGLKSNDTAVYYCARGDVVTSTDYWGQGTLVTVSS

SEQ ID NO: 28883 - protein, 94 aa, Homo sapiens
SGYIFIDQYIHWVRQAPGQGLEWMGWINPKNGVPNYAQKFQGWVIMTRDTSIRTAYMELIGLKSTDTAVYYCARGDVVTSTDYWGQGSLVTVSS

SEQ ID NO: 28884 - protein, 105 aa, Homo sapiens
SVSGGSISSSSSFWGWIRQPPGKGLEWIGSMYYSGSTYYNPSLKSRVTISVDTSKNQFSLKLSSVNAADTAVYYCARLLGTLEYSDYDPPLSDYWGQGTLVTVSS

SEQ ID NO: 28885 - protein, 105 aa, Homo sapiens; identical to SEQ ID NO: 28884

SEQ ID NO: 28886 - protein, 98 aa, Homo sapiens
AASGFTFSSFAMSWVRQAPGKGLEWVSTITSRGGSAYYADSVKGRFTISRDISKNTLFLQMNSLRAEDTAVYFCAKELDSPGIYMNVWGKGTTVTVSS

SEQ ID NO: 28887 - protein, 98 aa, Homo sapiens
AASGFTFSSFAMSWVRQAPGKGLEWVSTINGGGGRTYYADSVKGRFTVSRDNSNNTLYLQMNTLSAEDTALYYCAKELDSPGIYMNVWGKGTTVTVSS

SEQ ID NO: 28888 - protein, 101 aa, Homo sapiens
KGSGYNFATFWTAWVRQVPGKGLEWMGIIYPIDSETKYSPSFQGQVTMSVDKSISTAYLQWSSLKASDTAIYYCARHTAVAGESPPWLHYWGQGTLVTVSS

SEQ ID NO: 28889 - protein, 101 aa, Homo sapiens
KGSGYSFTTFWIAWVRQMPGKGLEWMGIIYPGDSDTRYSPSFQGQVTISADKSISTAYLQWSSLKASDTAMYYCARHTAVAGESPPWLHYWGQGTLVTVSS

SEQ ID NO: 28890 - protein, 99 aa, Homo sapiens
AASGFNFSDYEMNWVRQVPGKGLEWVSYIDSGSSPIFYADSVKGRFTISRDNAKNSLYLQMNSLRAEDTALYYCARGVSAHPQYQFDYWGQGTLVTVSS

SEQ ID NO: 28891 - protein, 99 aa, Homo sapiens
AASGFNFSDYEMNWVRQVPGKGLEWISYIDSGSSPFFYADSVKGRFTVSRDNAKKSLYLQMDSLRAEDSALYYCARGVSAHPQYQFDYWGQGTLVTVSS

SEQ ID NO: 28892 - protein, 94 aa, Homo sapiens
AAAGFNFSNYAMAWVRQTPGKGLEWVSDISATGGSTLYADFVKGRFTISRDNSKNTMYLQMHSLTAEDSAVYYCANLPGTSGYWGQGTLVTVSS

SEQ ID NO: 28893 - protein, 94 aa, Homo sapiens
AASGFTLSNYAMAWVRQTPGKGLEWVSDISATGDSTYYADFVKGRFTISRDNSKNTMYLQMHSLTAEDSAVYYCANLPGTSGYWGQGTLVTVSS

SEQ ID NO: 28894 - protein, 94 aa, Homo sapiens
AASGFSLSNYAMAWVRQTPGKGLEWVSDISATGGSANYADFVKGRFTISRDNSKNTVYLQMDGLTAEDSAVYYCANLPGTSGYWGQGTLVTVSS

SEQ ID NO: 28895 - protein, 94 aa, Homo sapiens
AASGFSLSAYAMAWVRQTPGKGLEWVSEISATGDSTYYADFVKGRFTISRDNSKNTMYLQMHSLTAEDSAVYYCANLPGTSGYWGQGTLVTVSS

SEQ ID NO: 28896 - protein, 94 aa, Homo sapiens; identical to SEQ ID NO: 28893

SEQ ID NO: 28897 - protein, 101 aa, Homo sapiens
TVSGGSVSSSPYYWNWIRQPPGKGLEWIGYISYSGNTNYSPSLRGRVTIYVDTSKNQVSLQLSSVTAADTAVYYCGRSDRRGSSFVEFDYWGQGTLVTVSS

SEQ ID NO: 28898 - protein, 100 aa, Homo sapiens
VSGGSVSSSPYYWNWIRQPPGKGLEWIGYISYSGNTNYSPSLRGRVTIYVDTSKNQVSLQLSSVTAADTAVYYCGRSDRRGSSFVEFDYWGQGTLVTVSS

SEQ ID NO: 28899 - protein, 101 aa, Homo sapiens
TVSGGSVSSGTYYWNWIRQPPGKGLEWVGYIYYSGGTNYNPSLKGRVTISVDTSKNQVSLQLSSVTAADTAVYFCGRSDRRGSSFVEFDYWGQGTLVTVSS

SEQ ID NO: 28900 - protein, 101 aa, Homo sapiens
SVSGGSVSSGTHYWTWIRQPPGKGLEWIAHISYTGNTNYNPSLRGRVTISVDPSKNQVSLQLSSVTAADTAVYYCGRSDRRGSSFVEFDYWGQGTLVTVSS

SEQ ID NO: 28901 - protein, 101 aa, Homo sapiens
TVSGGSVSSGTYYWNWIRQPPGKGLEWVGYIYYSGGTNYNPSLNGRVTISVDTSKNQVSLQLTSVTAADTAVYFCGRSDRRGSSFVEFDYWGQGTLVTVSS

SEQ ID NO: 28902 - protein, 101 aa, Homo sapiens; identical to SEQ ID NO: 28897

SEQ ID NO: 28903 - protein, 101 aa, Homo sapiens; identical to SEQ ID NO: 28897

SEQ ID NO: 28904 - protein, 101 aa, Homo sapiens
TVSGGSVSSGTYYWNWIRQPPGKGLEWIAYISYNGNTNYNPSLRGRVTISVDTSKNQVSLQLSSVTAADTAVYYCGRSDRRGSSFVEFDYWGQGTLVTVSS

SEQ ID NO: 28905 - protein, 101 aa, Homo sapiens
TVSGGSVSSSPYYWNWIRQPPGKGLEWIGYISYSGNTNYSPSLRGRVTISVDTSKNQVSLQLSSVTAADTAVYYCGRSDRRGSSFVEFDYWGQGTLVTVSS

SEQ ID NO: 28906 - protein, 101 aa, Homo sapiens; identical to SEQ ID NO: 28899

SEQ ID NO: 28907 - protein, 101 aa, Homo sapiens; identical to SEQ ID NO: 28897

SEQ ID NO: 28908 - protein, 101 aa, Homo sapiens
TVSGGSVSSSPYYWNWIRQPPGKGLEWIGYISYSGNTNYSPSLRGRVTIYVDTSKNQVSLQLSSMTAADTAVYYCGRSDRRGSSFVEFDYWGQGTLVTVSS

SEQ ID NO: 28909 - protein, 108 aa, Homo sapiens
VASGFTFENYWMNWVRQAPGKGLEWVASIMQDGSERSYGDSLEGRFTISRDNAKNSLYLEMNSLRAEDSAVYYCARAQYSITLFGSTIIRNYYYMDVWGIGTTVTVSS

SEQ ID NO: 28910 - protein, 108 aa, Homo sapiens
AASGFSFENYWMNWVRQAPGKGLEWVASIMQDGSKRHYGDSLEGRFTISRDNAKNSLYLEMNSLRAEDSAVYYCARAQYSITLFGSTIIRNYYYMDVWGIGTTVTVSS

SEQ ID NO: 28911 - protein, 108 aa, Homo sapiens
AASGFIFENYWMNWVRQAPGKGLEWVASIMQDGSKRSYGDSLEGRFTISRDNAKNSLSLEMNSLRAEDSAVYYCARAQYSITLFGSTIIRNYYYMDVWGIGTTVTVSS

SEQ ID NO: 28912 - protein, 108 aa, Homo sapiens; identical to SEQ ID NO: 28909

SEQ ID NO: 28913 - protein, 108 aa, Homo sapiens
AASGFTFENYWMNWVRQAPGKGLEWVASIMQDGSKRHYGDSLEGRFTISRDNAKNSLYLEMNSLRAEDSAVYYCARAQYSITLFGSTIIRNYYYMDVWGIGTTVTVSS

SEQ ID NO: 28914 - protein, 108 aa, Homo sapiens
VASGFTFENYWMNWVRQAPGKGLEWVASIMQDGSKRYYGDSLEGRFTISRDNAKNSLYLEMISLRAEDSAVYYCARAQYSITLFGSTIIRNYYYMDVWGIGTTVTVSS

SEQ ID NO: 28915 - protein, 108 aa, Homo sapiens
AASGFTFENYWMNWVRQAPGKGLEWVASIMQDGSKRSYGDSLEGRFTISRDNAKNSLSLEMNSLRAEDSAVYYCARAQYSITLFGSTIIRNYYYMDVWGIGTTVTVSS

SEQ ID NO: 28916 - protein, 108 aa, Homo sapiens; identical to SEQ ID NO: 28913

SEQ ID NO: 28917 - protein, 108 aa, Homo sapiens
VASGFTFENYWMNWVRQAPGKGLEWVASIMQDGSKRSYGDSLEGRFTISRDNAKNSLYLEMNSLRAEDSAVYYCARAQYSITLFGSTIIRNYYYMDVWGIGTTVTVSS

SEQ ID NO: 28918 - protein, 108 aa, Homo sapiens; identical to SEQ ID NO: 28917

SEQ ID NO: 28919 - protein, 108 aa, Homo sapiens; identical to SEQ ID NO: 28914

SEQ ID NO: 28920 - protein, 108 aa, Homo sapiens
VASGFTFENYWMNWVRQAPGKGLEWVATIMQDGSKRYYGDSLEGRFTISRDNAKNSLYLEMNSLRAEDSAVYYCARAQYSITLFGSTIIRNYYYMDVWGIGTTVTVSS

SEQ ID NO: 28921 - protein, 98 aa, Homo sapiens
ASGYTFTSYYMHWVRQAPGQGLEWMGIINPSVGNTSYAQKFQGRVTMTRDTSTSTVYMELSSLRSEDTAVYYCARARHIVVVSLLDNWGQGSLVTVSS

SEQ ID NO: 28922 - protein, 98 aa, Homo sapiens
ASGYTFTSYYMHWVRQAPGQGLEWMGIINPSVGNTSYAQKFQGRVTMTRDTSTSTVYMELSSLRSEDTAVYYCARARHIVVVSLLDNWGQGTLVTVSS

SEQ ID NO: 28923 - protein, 100 aa, Homo sapiens
AASGFFVADVAMHWVRQRPGKGLEWVALITRDGPTTYYADSVRGRFTISRDSIKNALFLEMNNLAPEDNAIYFCAKDLGTTPVFGGSVIDYWGRGTLVTV

SEQ ID NO: 28924 - protein, 100 aa, Homo sapiens
AASGFFVADVAMHWVRQRPGKGLEWVSLITREGPTTYYEDSVRGRFTISRDNIKNALYLQMNNLGTEDTALYYCAKDLGTTPVFGGSVIDYWGRGTLVTV

SEQ ID NO: 28925 - protein, 100 aa, Homo sapiens
AASGFFVADVAMHWVRQRPGKGLEWVALITRDGPTTYYADSVGGRFTISRDSIKNALYLEMNNLAPEDNAIYYCAKDLGTTPVFGGSVIDYWGRGTLVTV

SEQ ID NO: 28926 - protein, 101 aa, Homo sapiens
ATSGFTFSSYGMHWVRQAPGKGLEWVAVISYEGSNRFYADSVKGRFTISRDNSKNTVYLQMNSLRPEDTAVYYCAKKWGAYTVTADYFDSWGQGTLVTVSS

SEQ ID NO: 28927 - protein, 101 aa, Homo sapiens; identical to SEQ ID NO: 28926

SEQ ID NO: 28928 - protein, 110 aa, Homo sapiens
AASGFTFSTNGMHWVRQAPGKGLEWVAVISYDGSNKYYADSVKGRFTISRDNSKNTLYLQMDSLIPEDSAMYYCAKINSRDCTSTTCYLTRGYYYYMDVWGKGTTVTVSS

SEQ ID NO: 28929 - protein, 110 aa, Homo sapiens; identical to SEQ ID NO: 28928

SEQ ID NO: 28930 - protein, 110 aa, Homo sapiens; identical to SEQ ID NO: 28928

SEQ ID NO: 28931 - protein, 110 aa, Homo sapiens; identical to SEQ ID NO: 28928

SEQ ID NO: 28932 - protein, 110 aa, Homo sapiens; identical to SEQ ID NO: 28928

SEQ ID NO: 28933 - protein, 102 aa, Homo sapiens
AVSGASISSDNWWSWVRQSPGKGLEWIGEIFHDGKTNFNPSLTSRVTISIDKSKNQMYLKLTSVTAADTAVYYCARETSRFLEWLRGGFNYWGQGSLVTVSS

SEQ ID NO: 28934 - protein, 102 aa, Homo sapiens
AVSGGSISSDNWWSWVRQSPGKGLEWIGEIFHDGKTNFNPSFNSRVTISVDKSRNQISLKLASVTAADTAVYYCARETSRFLEWLRGGFNYWGQGSLVTVSS

SEQ ID NO: 28935 - protein, 102 aa, Homo sapiens; identical to SEQ ID NO: 28933

SEQ ID NO: 28936 - protein, 101 aa, Homo sapiens
TVSGGSIRSFHWTWIRQPPGKGLEWIGNIYSGGSTDYNPSLKSRVTMSLDTSKNQFSLKLASVTAADTAVYYCARETSRFLEWLRGGFNYWGQGSLVTVSS

SEQ ID NO: 28937 - protein, 98 aa, Homo sapiens
ASGFMLTTYWFAWVRQMPGKGLEWMGIIFLDDSDTRYSPSFQGQVTISGDKSITTAYLQWSSLKASDTAMYYCARGRSGTLQDAFHIWGQGTMVTVSS

SEQ ID NO: 28938 - protein, 98 aa, Homo sapiens; identical to SEQ ID NO: 28937

SEQ ID NO: 28939 - protein, 98 aa, Homo sapiens
ISGDSVSSDSATWNWIRQSPSRGLEWLGRAYYRSKWYNDYAVSVKSRISINPDTSKNQFSLQLNSVTPEDTAVYYCTREAVPGWSDYWGQGTLVTVSS

SEQ ID NO: 28940 - protein, 98 aa, Homo sapiens
ISGDSVSSNSASWNWIRQSPSRGLEWLGRTYYRSKWYNDYSVAVKSRISINPDTSKNQFSLQLNSVTPEDTAVYYCTREAVPGWSDYWGQGALVTVSS

SEQ ID NO: 28941 - protein, 93 aa, Homo sapiens
AVSGFTVSKSDFNWVRQAPGQGLQWVAYIGYSSSTMYYASSVKDRFTISRDTAKDSLYLQMNSLRDEDTAIYYCSRGRDGIGWGQGTLVTVSS

SEQ ID NO: 28942 - protein, 92 aa, Homo sapiens
ASGFSFTPHDMNWVRQAPGKGLEWVAYITGDSNIKWYADSVKGRFTISRDNAKNSMYLQMDSLRDDDTAVYYCSRGRDGIGWGQGTLVSVSS

SEQ ID NO: 28943 - protein, 111 aa, Homo sapiens
TQTLTLTCTFSGFSLNTSGMSMSWIRQPPGKALEWLALIDWDDDKFYSTSLKTRLTISKDTSKNHVVLTMTNMDPVDTGTYYCARKYDNRLDGLGGAFDIWGQGTMVTVSS

SEQ ID NO: 28944 - protein, 111 aa, Homo sapiens
TQTLTLTCTFSGFSLSTSGMCVSWIRQPPGKALEWLALVDWDDEKYYSTSLKTRLNISKDTSKNQVVLTMTNMEPVDTGTYYCARKYDNRLDGLGGAFDIWGQGTVVTVSS

SEQ ID NO: 28945 - protein, 94 aa, Homo sapiens
ASGFTFASYSMNWVRQAPGKGLEWVSYITSSSGTIYYADSLRGRFTISRDNAKSSLFLQLNSLRDDDTAVYYCARGSGPWGLDYWGQGTLVTVS

SEQ ID NO: 28946 - protein, 95 aa, Homo sapiens
AASGFTFTSYSMNWVRQAPGKGLEWVSYITSSSGTVYYAGSVRGRFTISRDNGKRSLFLQLNSLRDEDTAVYYCARGSGPWGLDYWGQGTLVTVS

SEQ ID NO: 28947 - protein, 98 aa, Homo sapiens
AASGFTFSSYGMSWVRQAPGEGLEWVSSISGGGGATYYADSVKGRFTISRDNSKNTLFLQMNSLKVEDTAVYHCAKYAMPGIPGLCDWGQGTLVTVSS

SEQ ID NO: 28948 - protein, 98 aa, Homo sapiens; identical to SEQ ID NO: 28947

SEQ ID NO: 28949 - protein, 98 aa, Homo sapiens
AASGFTFSSYGMSWVRQAPGEGLEWVSSISGGGGATYYADSVKGRFTISRDNSKNTLYLQMNSLRVEDTAVYYCAKYAMPGIPGLCDWGQGTLVTVSS

SEQ ID NO: 28950 - protein, 94 aa, Homo sapiens
VASGFTFSSFWMGWVRQAPGKGLEWVAMMNQDGNKRLYVDSVKGRFTISRDNAKDSLFLQANSLRAEDTAVYYCSRPQQWTVADWGQGTLVTVS

SEQ ID NO: 28951 - protein, 94 aa, Homo sapiens
VASGFTFSSFWMGWVRQAPGKGLEWVAMMNQDRNKRLYVDSVKGRFTISRDNAKDSLFLQANSLRAEDTAVYYCSRPQQWTVADWGQGTLVTVS

SEQ ID NO: 28952 - protein, 100 aa, Homo sapiens
KGSEDTFTRSWIAWLRQKPGKGLEWMGMIYPGDSDIQYSPSIQGQVTISADMSIYTASLEWKSLKASDTAVYYCARLPTPGRHHAYFDYWGQGTLVTASS

SEQ ID NO: 28953 - protein, 100 aa, Homo sapiens; identical to SEQ ID NO: 28952

SEQ ID NO: 28954 - protein, 102 aa, Homo sapiens
TVSGGSISSSSFYWGWIRQPPGKGLEWIGSIYYSGSTYYNPSLKSRVAISVDTSQNQFSLRLNSVTAADTAVYYCARQGRYCSGTTCYIAHWGQGTLVTVSS

SEQ ID NO: 28955 - protein, 102 aa, Homo sapiens
TVSGGSISSSSFYWGWIRQPPGKGLEWIGSIYYSGSTYYNPSLKSRVAISVDTSKNQFSLRLNSVTAADTAVYYCARQGRYCSGTTCYIAHWGQGTLVTVSS

SEQ ID NO: 28956 - protein, 100 aa, Homo sapiens
VASGFAFSSYAMSWVRQAPGKGLEWASGISGGGRSTFYVDSVKGRFTISRDNSRKTLYLEMNSLRVEDTAVYRCARNSAWSDGHYYYMDVWGKGTTVTVS

SEQ ID NO: 28957 - protein, 101 aa, Homo sapiens
AASGFSFSTYAMSWVRQAPGKGLEWASGISGGGRNTFYVDSVKGRFTISRDNSRKTLYLQMNSLRAEDTAVYRCARNSAWSDGHYYYMDVWGKGTTVTVSS

SEQ ID NO: 28958 - protein, 100 aa, Homo sapiens
AGSGFSFDEYAMHWVRQAPGKGLEWVSGISSNSGSISYADSVKGRFTISRDNAKNSLYLQMNSLRPEDTALYYCAKDRYCIGGICPIDYWGQGTLVTVSS

SEQ ID NO: 28959 - protein, 100 aa, Homo sapiens
AGSGFSFDEYAMHWVRLAPGKGLEWVSGISADSGVISYADSVKGRFTISRDNAKNSLYLQMNSLRPEDTALYYCAKDRYCIGGICPIDYWGQGTLVTVSS

SEQ ID NO: 28960 - protein, 98 aa, Homo sapiens
AASGFTFSSYGMSWVRQAPGEGLEWVSSISGGGAVTYYADSVKGRFTISRDNSKNTLYLQMNSLRVEDTAVYYCAKYAVPGIPGLCDWGQGTLVTVSS

SEQ ID NO: 28961 - protein, 98 aa, Homo sapiens
AASGFTFSSYGMSWVRQAPGEGLEWVSSISGGGGATYYADSVKGRFTISRDNSKNTLYLQMDSLRVEDTAVYYCAKYAVPGIPGLCDWGQGTLVTVSS

SEQ ID NO: 28962 - protein, 102 aa, Homo sapiens
AASGFTFNNYAMNWVRQAPGKGLEWVSGISGGGITTYYADSVKGRFTISRDNSKSTLYLQMNSLRAEDTAVYYCAKGGGTSYTVAGFLFEYWGQGTLVTVSS

SEQ ID NO: 28963 - protein, 102 aa, Homo sapiens
AASGFTFNNYAMNWVRQAPGKGLEWVSGISGGGITTYYADSVKGRFTISRDKSKSTLYLQMNSLRAEDTAVYYCAKGGGTSYTVAGFLFEYWGQGTLVTVSS

SEQ ID NO: 28964 - protein, 92 aa, Homo sapiens
ASGFIFSTSAMIWVRQAPGKGLDWVATISYDGSGKYYADSVKGRFAISRDDSKSTVFLQMNSLRPEDTAVYYCAKNWNADNWGRGTLVTVSS

SEQ ID NO: 28965 - protein, 92 aa, Homo sapiens
ASGFIFSTSAMIWVRQAPGKGLDWVADISYDGSGKYYADSVKGRFAISRDDSKSTVFLQMNSLRPEDTAVYYCAKNWNADNWGRGTLVTVSS

SEQ ID NO: 28966 - protein, 93 aa, Homo sapiens
AASGFIFSTSAMIWVRQAPGKGLDWVALISYDGNDKYYAVSVKGRFAISRDDSKSTVFLQMNSLRPEDTAVYYCAKNWNADNWGQGSLVTVSS

SEQ ID NO: 28967 - protein, 92 aa, Homo sapiens
ASGFIFSTSAMIWVRQAPGKGLDWVAAISYDGSGKYYADSVKGRFAISRDDSKSTVFLQMNSLRPEDTAVYYCAKNWNADNWGRGTLVTVSS

SEQ ID NO: 28968 - protein, 96 aa, Homo sapiens
VASGLNFNRYGMHWIRQGPGKGLEWVAVVWHDGSKTYYDDSVKGRFTISRDNSKNTVYLQMDSLRAEDTAVYFCAGTLQYGDFVYWGQGTLVTVSS

SEQ ID NO: 28969 - protein, 96 aa, Homo sapiens
AASGLTFDRYGMHWVRQAPGKGLEWVAVIWYDGSNKYYADSVKGRFTISRDNSKNTLYLQMDSLRAEDTAVYFCAGTLQYGDFVYWGQGTLVTVSS

SEQ ID NO: 28970 - protein, 99 aa, Homo sapiens
AASGFSIRSYWMSWVRQAPGKGLEWLGNIKQDGSETYYKDSVKGRFTISRDNAKNSLYVQLNSLRVEDTAVYYCARDREYRGSHPIDYWGQGTLVTVSS

SEQ ID NO: 28971 - protein, 99 aa, Homo sapiens
AVSGFSIRNYWMSWFRQAPGKGLEWLANIKQDGTETYYVDFVKGRFTISRDNAKNSLYVQLNSLRVDDTAVYYCARDREYRGSHPIDYWGQGTLVAVSS

SEQ ID NO: 28972 - protein, 99 aa, Homo sapiens
AASGFSFSSYWMSWVRQAPGKGLEWLGNIKQDGSETYYKESVKGRFTISRDNAKNSLYVQLNSLRVEDTAVYYCARDREYRGSHPIDYWGQGTLVTVSS

SEQ ID NO: 28973 - protein, 99 aa, Homo sapiens
AASGFTFSSYWMTWVRQTPGKGLEWVGNIKQDGSEVYCVDSVKGRFTFSRDNAKNSLYLQMNSLRAEDTAVYYCARDREYRGSHPIDYWGQGTLVTVSS

SEQ ID NO: 28974 - protein, 94 aa, Homo sapiens
GSGFIFGSHWMSWIRQSPGKAPEWVALINQDGRMALYVDSVKGRFTISRDNARKSLRLQMDGLRGEDTAVYYCAREAFRGSECWGQGTLVAVSS

SEQ ID NO: 28975 - protein, 94 aa, Homo sapiens
GSGFIFGSHWMSWIRQSPGKAPEWVALINQDGRMALYADSVKGRFTISRDNARKSLRLQMDGLRGEDTAVYYCAREAFRGSECWGQGTLVAVSS

SEQ ID NO: 28976 - protein, 99 aa, Homo sapiens
TVSGGSITDHYWNWIRQSPEKGLEWVGHIRSTENTHQNPSLNGRLTLSLDTSKNQISLKLNSVTAADTAVYYCGRSGTSGNSFVEFDYWGQGTLVTVSS

SEQ ID NO: 28977 - protein, 99 aa, Homo sapiens
SVSGGSITDHYWNWIRQSPGKGLEWVGHIRQTESTHQNPSLNGRLTLSLDTSKNQISLKLSSVTAADTAVYYCGRSGTSGNSFVEFDYWGQGILVTVSS

SEQ ID NO: 28978 - protein, 112 aa, Homo sapiens
TQTLALTCTFSGFSLSTSGVGVGWIRQPPGKALEWLAFIYWDDDKRYSPSLRTRLTITKDTSNNQVVLTMTTMDPVDTATYYCAHRLPGHSGGWDAGYLDFWGQGTLVTVSS

SEQ ID NO: 28979 - protein, 112 aa, Homo sapiens; identical to SEQ ID NO: 28978

SEQ ID NO: 28980 - protein, 112 aa, Homo sapiens
TQTLALTCTFSGFSLSTSGVGVGWIRQPPGKALEWLAFIYWDDDKRYSPSLRTRLTITKDTSKNLVVLTMTTMDPVDTGTYYCAHRLPGHSGGWDAGYLDFWGQGTLVTVSS

SEQ ID NO: 28981 - protein, 112 aa, Homo sapiens
TQTLALTCTFSGFSLSTSGVGVGWIRQPPGKALEWLAFIYWDDDKRYSPSLRTRLSITKDTSKNLVVLTMTTMDPVDTGTYYCAHRLPGHSGGWDAGYLDFWGQGTLVTVSS

SEQ ID NO: 28982 - protein, 94 aa, Homo sapiens
SVSGDSVRYYYWSWIRQPPGKGLEWIGYIYYSGSTRYNPSLQSRVTISTDTSKNQFSLRLTSVTAADTAVYYCARGVSLAIDSWGQGILVSVSS

SEQ ID NO: 28983 - protein, 94 aa, Homo sapiens
SVSGDSVRNYYWSWIRQPPGKGLEWIGYIYYSGSTKYNPSLKSRVTISTDTSKNQFSLRLTSVTAADTAVYYCARGVSLAIDSWGQGTLVSVSS

SEQ ID NO: 28984 - protein, 94 aa, Homo sapiens
IVSDDSVRNYYWSWIRQPPGKGLEWIGYIYYSGSTKYNPSLKSRVTISTDTSKNQFSLRLTSVTAADTAVYYCARGVSLAIDSWGQGALVSVSS

SEQ ID NO: 28985 - protein, 94 aa, Homo sapiens
AASGFTFSSYTMSWVRQAPGKGLEWVSAVTGSGSATSYADSVKGRFTISRDNSMDTLFLQINSLRAEDTAVYFCARTPGFFDYWGQGSLVTVSS

SEQ ID NO: 28986 - protein, 94 aa, Homo sapiens
AASGFTFSSYTMSWVRQAPGKGLEWVSAITGSGSATSYADSVKGRFTISRDNSMDTLFLQINSLRAEDTAVYFCARTPGFFDYWGQGSLVTVSS

SEQ ID NO: 28987 - protein, 99 aa, Homo sapiens
EASGFTFSDSYMTWIRQAPGKGLEWVSIMSGSGNAIYNADSVKGRFTISRDNSKNSLYLQMNSLRAEDTAVYYCARGSGFGELGVFDYWGHGTLVTVSS

SEQ ID NO: 28988 - protein, 99 aa, Homo sapiens
EASGFTFSDSYMTWIRQAPGKGLEWVSIMSGSGNAIYNADSVKGRFTISRDNSKNSLYLQMNSLRVEDTAVYYCARGSGFGELGVFDYWGHGTLVTVSS

SEQ ID NO: 28989 - protein, 107 aa, Homo sapiens
TQTLTLTCTFSGLSLSTNGVGVGWIRQPPGKALEWLALIYWDDDKRYSPSLKSRLTITKDTSRNQVVLTMTNMDPVDTGTYYCARGGSDYNYAFDSWGQGTLVTVSS

SEQ ID NO: 28990 - protein, 107 aa, Homo sapiens
TQTLTLTCTFSGLSLSTNGVGVNWIRQPPGKALEWLALIYWDDDKSYSPSLKSRLIITKDTSRNQVVLTMTNMDPVDTGTYYCARGGSDYNYAFDSWGQGTLVTVSS

SEQ ID NO: 28991 - protein, 107 aa, Homo sapiens
TQTLTLTCTFSGFSLNTYAVGVGWIRQPPGKALEWLALIYWDDDKTYSPSLKSRLTITKDTSSNQVVLTMTNMDPVDTGTYYCARGGSDYNYAFDSWGQGTLVTVSS

SEQ ID NO: 28992 - protein, 97 aa, Homo sapiens
AASGFRFSDYYMSWIRQAPGRGLEWISYISSSGGSIYYTDSVKGRFTVSRDNAKKSLYLQMNSLRAEDTAVYYCARDPTIKYYMDVWGKGTTVTVSS

SEQ ID NO: 28993 - protein, 97 aa, Homo sapiens
AASGFTFSDYYMSWIRQAPGKGLEWLSYISSSGSTTYYADSVKGRFTISRDNAKNSLYLHMNSLRAEDTAVYYCARDPTIKYYMDVWGRGTTVTVSS

SEQ ID NO: 28994 - protein, 103 aa, Homo sapiens
AASGFTLSGSAVEWVRQASGKGLEWVGRIRSKANRYATEYHASVKGRFTISRDDSKNTAYLQMSSLKIEDTAIYYCVSRGSDPVDEVHWWDFWGQGTLVTVSS

SEQ ID NO: 28995 - protein, 103 aa, Homo sapiens
AASGFSLSGSIVEWVRQASGKGLEWVGRIRSKANGDATAYDASLKGRFTISRDDSKNTAYLQMSSLKIEDTAIYYCVSRGSDPVDEVHWWDFWGQGTLVTVSS

SEQ ID NO: 28996 - protein, 105 aa, Homo sapiens
TASGFAFSRYAMTWVRQAPGKGLEWLGFIRSESYGDTTEYAASVKGRFFISKDDSKRIAYLQMNSLEIEDTGVYHCIRGGDFWSGPYSENWFDTWGQGTLVTVSS

SEQ ID NO: 28997 - protein, 105 aa, Homo sapiens
TASGFAFSRYAMTWVRQAPGKGLEWLGFIRSESYGDTSEYAASVKGRFFISKDDSKRVAYLQMNSLEIEDTGVYYCIRGGDFWSGPYSENWFDTWGQGTLVTVSS

SEQ ID NO: 28998 - protein, 95 aa, Homo sapiens
ASGYSFTHYDVNWVRQATGQGPEWMGWVDHSSGNAGFPQKFQGRVTLTRDTSISTAYLELSRLTSDDTGVYYCVVGMTEFTFDIWGQGTMVTVSS

SEQ ID NO: 28999 - protein, 95 aa, Homo sapiens
ASGYTLTQYDVNWVRQAPGQGPEWMGWVHRSSGNAGFAQKFQGRVTLTRDTSINTAYLELSSLRSDDTGVYYCVVGMTEFTFDIWGQGTMVTVSS

SEQ ID NO: 29000 - protein, 97 aa, Homo sapiens
AVSGFTFTNAWMSWVRQAPGRGLEWLGRIKSKSDRGTIDYAAALKGRFTISRDDSKNTLYLQMNSLNTEDTAVYYCTTDYLTAFDIWGQGTMVTVSS

SEQ ID NO: 29001 - protein, 97 aa, Homo sapiens; identical to SEQ ID NO: 29000

SEQ ID NO: 29002 - protein, 97 aa, Homo sapiens; identical to SEQ ID NO: 29000

SEQ ID NO: 29003 - protein, 97 aa, Homo sapiens
AVSGFTFTNAWMSWVRQAPGRGLEWVGRIKSKSDRGTIDYAAALKGRFTISRDDSKNTLYLQMNSLNTEDTAVYYCTTDYLTAFDIWGQGTMVTVSS

SEQ ID NO: 29004 - protein, 105 aa, Homo sapiens
AASGFTFSSYGMHWVRQAPGKGLEWAAVIWYDGSNKYYADSVKGRFTISRDNSKNTLYLQMNSLRAEDTAVYYCARDKGIMVYASIHYYYYMDVWGKGTTVTVSS

SEQ ID NO: 29005 - protein, 105 aa, Homo sapiens
AASGFTFSSYGMHWVRQAPGKGLEWVAVIWYDGSNKYYADSVKGRFTISRDNSKNTLYLQINSLRAEDTAVYYCARDKGIMVYASIHYYYYMDVWGKGTTVTVSS

SEQ ID NO: 29006 - protein, 101 aa, Homo sapiens
TVSGGAISSSSFYWGWIRQPPEKGLEWIGSISHDGATYYNPSLKSRVTISVDTSRNQFSLEVDSVSAADTAIYYCTRHVGNTVTKAKFESWGQGTLVTVSS

SEQ ID NO: 29007 - protein, 101 aa, Homo sapiens
TVSGGAISSSDYYWGWIRQPPGKGLEWIGSIYYAGDTYYNPSLQSPVSISVDTSKNQFSLKVNSVTAADTAVYYCTRHVGNTVTKAKFESWGQGTLVTVSS

SEQ ID NO: 29008 - protein, 99 aa, Homo sapiens
AATGFTFSSFAMSWVRQAPGKGLEWVSGVGGDGADTYYADSVRGRFTISRDNSKNTLSLQMNSLRVDDTAVYYCAKEIGLSGIFVFDHWGQGALVTVSS

SEQ ID NO: 29009 - protein, 99 aa, Homo sapiens
AATGFTFSSFAMSWVRQAPGKGLEWVSSVGGDGADTYYADSVRGRFTISRDNSKNTLSLQMNSLRVDDTAVYYCAKEIGLSGIFVFDHWGQGALVTVSS

SEQ ID NO: 29010 - protein, 102 aa, Homo sapiens
KASGYDFTNYWILWVRQMPGKGLEWVGITFPRDSDTRYSPSFQGQVTISADKSISTAYLQWNTLKASDTAMYYCARRFCGTPTTCSSYFDYWGQGSLVTVSS

SEQ ID NO: 29011 - protein, 102 aa, Homo sapiens
KASGYDFTNYWILWVRQMPGKGLEWVGITFPRDSDTRYSPSFQGQVTISADKSISTAYLQWNSLKASDTAMYYCARRFCGTPTTCSSYFDYWGQGSLVTVSS

SEQ ID NO: 29012 - protein, 99 aa, Homo sapiens
AASGFTFSDYYLEWVRQTPGKGLEWVGLTRNKANSYTTEYAASVKGRFTISRDDSKNSLYLQMNSLKTEDTAIYYCARGLGFGNAYMDVWGKGTTVTVS

SEQ ID NO: 29013 - protein, 100 aa, Homo sapiens
AASGFTFSDYYIQWVRQTPGKGLEWVGLTRNKGASYTTEYAPSVKGRFTISRDFSNNSVYLQMKSLKTEDTAIYYCARGLGFGNAYMDVWGKGTTVTVSS

SEQ ID NO: 29014 - protein, 105 aa, Homo sapiens
TVSGGSISSSSYYWGWIRQPPGKGLEWIGSISYSGSTYYNSTLKNIVTMSVDTSKNEFSLKVSSVTAADTALYYCARHMAGKWGVATIQSAFGIWGQGTMVTVSS

SEQ ID NO: 29015 - protein, 105 aa, Homo sapiens
TVSGGSISSSTYYWGWIRQPPGKGLEWIGSINYSGSTYYNPSLKSGVTMSVDTSKNEFSLKVSSVTAADTALYYCARHMAGKWGVATIQSAFGIWGQGTVVTVSS

SEQ ID NO: 29016 - protein, 94 aa, Homo sapiens
ASGYTFINYAIHWVRQAPGQRPEWMGYINAGNGNTKYSPKFQGRVTISRDTSANIAYTELSSLRSEDTAVYYCARERAGTIDSWGQGSLVTVSS

SEQ ID NO: 29017 - protein, 94 aa, Homo sapiens
ASGFTFSNYAIHWVRQAPGQRLEWMGYFYAGNGNTKYSEKFQDRVTITGDTSASTSYMELTSLTSEDTAFYYCARERAGTIDSWGQGTLLTVSS

SEQ ID NO: 29018 - protein, 101 aa, Homo sapiens
TVSGGSVTTANYYWNWIRQPPGKGLEWIGYIHYTGRSDYHPSLKSRVTLSVDTSNNHLSLHLSSVTAADTAVYYCGRSDRIGPSFVEFDYCGQGILVTVSS

SEQ ID NO: 29019 - protein, 101 aa, Homo sapiens; identical to SEQ ID NO: 29018

SEQ ID NO: 29020 - protein, 101 aa, Homo sapiens
TVSGGSVTTANYFWNWIRQPPGKGLEWIGYIHYSGRSDYHPSLKSRVTLSVDTSNNHLSLHLSSVTAADTAVYYCGRSDRIGPSFVEFDYCGQGILVTVSS

SEQ ID NO: 29021 - protein, 101 aa, Homo sapiens
TVSGGSVATANYYWNWIRQPPGKGLEWIGYIHYSGRSDYHPSLKSRVTLSVDTSNNHLSLHLSSVTAADTAVYYCGRSDRIGPSFVEFDYCGQGILVTVSS

SEQ ID NO: 29022 - protein, 101 aa, Homo sapiens
TVSGGSVSSANNYWSWIRQPPGKGLEWIAYIHYNGRSDYHPSLKSRVTVSVDTSKNHLSLQLSSVTAADTAVYYCGRSDRIGPSFVEFDYCGQGILVTVSS

SEQ ID NO: 29023 - protein, 93 aa, Homo sapiens
SGYTFTKFDINWVRQATGQGLEWMGYMNPDNGNTGYAQKFQGRVTMTSNASIGTAYLELTSLTPDDTAVYFCARSDWNFLDFWGDGSLVSVSS

SEQ ID NO: 29024 - protein, 93 aa, Homo sapiens
SGYTFTNFDINWVRQATGQGLEWMGYMNPDNGNTGYAQKFQGRVTMTRNTSIGTAYLELSSLTSDDTAVYFCARSDWNFLDFWGDGSLVSVSS

SEQ ID NO: 29025 - protein, 93 aa, Homo sapiens
SGYTFTKFDINWVRQATGQGLEWMGYMNPDNGNTGYAQKFQGRVTMTRNTSIGTAYLELSSLTSDDTAVYFCARSDWNFLDFWGDGSLVSVSS

SEQ ID NO: 29026 - protein, 93 aa, Homo sapiens
SGYTFTKFDINWVRQATGQGLEWMGYMNPDNGNTGYAQKFQGRITMTRNTSIGTAYLELRSLTSDDTAVYFCARSDWNFLDFWGEGSLVSVSS

SEQ ID NO: 29027 - protein, 93 aa, Homo sapiens; identical to SEQ ID NO: 29023

SEQ ID NO: 29028 - protein, 93 aa, Homo sapiens
SGYTFTNFDINWVRQATGQGLEWMGYMNPDNGNTGYAQKFQGRVTMTRNTSIGTAYLELTSLTSDDTAVYFCARSDWNFLDFWGDGSLVSVSS

SEQ ID NO: 29029 - protein, 106 aa, Homo sapiens
TVTGASINSYYWSWVRQAPGKGVEWLGSIYYSGSTDYNPSLGSRASISLDMDKNQFSLRLSSVTAADTAVYYCASLVGDCSRISCYFPGVAYKDVWGKGTTVTVSS

SEQ ID NO: 29030 - protein, 106 aa, Homo sapiens
TVTGASINSYYWSWVRQAPGKGVEWLGSIYYSGSTDYNPSLGSRASISLDMDKNQFSLRLSSVTPADTAVYYCASLVGDCSRISCYFPGVAYKDVWGKGTTVTVSS

SEQ ID NO: 29031 - protein, 97 aa, Homo sapiens
AASGFTFSTYAMAWVRQAPGKGLDWVSAISDSGGSTYYADSVKGRFTISRDNSKNTLFLQLNSLRPEDTAVYFCAKRILLNYFFDYWGQGALVTVSS

SEQ ID NO: 29032 - protein, 97 aa, Homo sapiens
AASGFTFGSYAMSWVRQAPGKGLEWVSAISDSGGSTYYADSVKGRFTISRDNSKYTLFLQLSSLRPEDTAVYYCAKRILLNYFFDYWGQGTLVTVSS

SEQ ID NO: 29033 - protein, 97 aa, Homo sapiens
VASGFTFSTYAMSWVRQAPGKGLDWVSAISDSGGNTYYADSVKGRFTISRDNSKNTLFLQLNSLRPEDTAVYYCAKRILLNYFFDYWGQGALVTVSS

SEQ ID NO: 29034 - protein, 96 aa, Homo sapiens
ISGDSVSSNSAAWNWFRQSPSRGLEWLGRTYYRSKWYNDYAVSVKSRITIDPDTSKNQFSLQLKSLTPEDTAVYYCAEGTGTFDYWGQGTLVTVSS

SEQ ID NO: 29035 - protein, 96 aa, Homo sapiens; identical to SEQ ID NO: 29034

SEQ ID NO: 29036 - protein, 96 aa, Homo sapiens
ISGDSVSSNSAAWNWFRQSPSRGIEWLGRTYYRSKWYYDYAVSVKSRITIDPDTSKNQFSLQLKSLTPEDAAVYYCAEGTGTFDYWGQGTLVTVSS

SEQ ID NO: 29037 - protein, 96 aa, Homo sapiens
ISGDSVSSNSAAWNWFRQSPSRGLEWLGRTYYRSKWYYDYAVSVKSRITIDPDTSKNQFSLQLRSLTPEDTAVYYCAEGTGTFDYWGQGTLVTVSS

SEQ ID NO: 29038 - protein, 96 aa, Homo sapiens
ISGDSVSSNSAAWNWFRQSPSRGLEWLGRTYYRSKWYYDYAVSVKSRITIDPDTSKNQFSLQLKSLTPEDTALYYCAEGTGTFDYWGQGTLVTVSS

SEQ ID NO: 29039 - protein, 96 aa, Homo sapiens; identical to SEQ ID NO: 29034

SEQ ID NO: 29040 - protein, 96 aa, Homo sapiens
ISGDSVSSNSAAWNWFRQSPSRGIEWLGRTYYRSKWYYDYAVSVKSRITIDPDTSKNQFSLQLKSLTPEDTAVYYCAEGTGTFDYWGQGTLVTVSS

SEQ ID NO: 29041 - protein, 96 aa, Homo sapiens; identical to SEQ ID NO: 29034

SEQ ID NO: 29042 - protein, 96 aa, Homo sapiens; identical to SEQ ID NO: 29037

SEQ ID NO: 29043 - protein, 96 aa, Homo sapiens
ISGDSVSSNSAAWNWFRQSPSRGLEWLGRTYYRSKWYNDYAVSVKSRITIDADTSRNQFSLQLKSLTPEDTAVYYCAEGTGTFDYWGQGTLVTVSS

SEQ ID NO: 29044 - protein, 96 aa, Homo sapiens
ISGDSVSSNNAAWNWFRQTPSRGLEWLGRTYYRSKWYTDYAVSVKSRITIDPDTSKNQFSLQLKSLTPEDTAVYYCAEGTGTFDYWGQGTLVTVSS

SEQ ID NO: 29045 - protein, 96 aa, Homo sapiens
ISGDSVSSNSAAWNWFRQSPSRGLEWLGRTYYRSKWYYDYAVSVKSRITIDPDTSKNQFSLQLKSLTPEDTAVYYCAEGTGTFDYWGQGTLVTVSS

SEQ ID NO: 29046 - protein, 99 aa, Homo sapiens
ASGGTFSNYALSWVRQAPGQGLEWMGGIIPIFGTANYAQRFQGRVTITADESTSTAYMELSGLRSEDTALYYCARERYGINIVDAFDIWGQGTTVTVSS

SEQ ID NO: 29047 - protein, 99 aa, Homo sapiens
ASGGTFSNYALSWVRQAPGQGLEWMGGIIPIFGTANYAQKFQGRVTITADESTSTAYMELSSLRSEDTALYYCARERYGINIVDAFDIWGQGTMVTVSS

SEQ ID NO: 29048 - protein, 99 aa, Homo sapiens; identical to SEQ ID NO: 29047

SEQ ID NO: 29049 - protein, 99 aa, Homo sapiens
ASGGTFSNYALSWVRQAPGQGLEWMGGIIPIFGTPNYAQKFQGRVTITADESTSTAYMELSSLTSEDTALYYCARERYGINIVDAFDIWGQGTMVSVSS

SEQ ID NO: 29050 - protein, 100 aa, Homo sapiens
AASGFTVSSNYMSWVRQAPGKGLEWVSVIYSGGSTYYADSVRGRFTISRDNSKNTLFLQMNSLRAEDTAVYYCGRDPIDPNWNYLSFDPWGQGTLVTVSS

SEQ ID NO: 29051 - protein, 100 aa, Homo sapiens
EASGFTVSSNYMSWVRQAPGKGLEWVSVIYSGGSTYYADSVKGRFTISRDNSKNTLYLQMNSLRAEDTAVYYCGRDPIDPNWNYLSFDPWGQGTLVTVSS

SEQ ID NO: 29052 - protein, 102 aa, Homo sapiens
GVSGGSISSGAFSWSWIRQPPGKGLEWVGYIYHTGSTYYNPSLKSRVTISLDRSKNQFSLKLSSVTAADTAVYFCARAGYCSSTSCYAFDIWGQGTMVTVSS

SEQ ID NO: 29053 - protein, 102 aa, Homo sapiens
GVSGGSISSGAFSWSWIRQPPGKGLEWVGYIYHTGSTYYTPSLKSRVTISLDRSNNQFSLKLSSVTAADTAVYFCARAGYCSSTSCYAFDIWGQGTMVTVSS

SEQ ID NO: 29054 - protein, 102 aa, Homo sapiens
AASGFTFSTYWMHWVRQAPGKGLVWVSRINNDATGTAYASSVKGRFTFSRDNAKNTVYLQMNSLRAEDTAMYYCARARWEYQLLSSDAFDLWGQGTMVTVSS

SEQ ID NO: 29055 - protein, 102 aa, Homo sapiens
AASGFTFSTYWMHWVRQAPGKGLVWVSRINNDASSTAYADSVKGRFTFSRDNAKNTVYLQMNSLRAEDTAVYYCARARWEYQLLSSDAFDLWGQGTMVTVSS

SEQ ID NO: 29056 - protein, 94 aa, Homo sapiens
AASGITVSTNYMNWVRQAPGKGLEWVSVINSGGTTYYADSVKGRFTISRDDSKNTLYLQMNTLRDEDTAVYYCARLGDYSLKDWGQGTLVTVSS

SEQ ID NO: 29057 - protein, 94 aa, Homo sapiens
AASGFTVSSNYISWVRQAPGKGLEWVSLINSGGTTYYADSVKGRFTISRDDSKNTLYLQMNTLRDEDTAVYYCARLGDYSLKDWGQGTLVTVSS

SEQ ID NO: 29058 - protein, 94 aa, Homo sapiens
AASGFTVSSNYMNWVRQAPGKGLEWVSVIYSDGTTYYADSVKGRFTISRDDSKNTLYLQMNTLRDEDTAVYYCARLGDYSLKDWGQGTLVTVSS

SEQ ID NO: 29059 - protein, 94 aa, Homo sapiens
GASGFTVSSNYMNWVRQAPGKGLEWVSVIYSGGNTYYAESVKGRFTISRDDSKNTLYLQMNSLRAEDTAVYYCARLGDYSLKDWGQGALVTVSS

SEQ ID NO: 29060 - protein, 94 aa, Homo sapiens
AASGFTVSSNYMNWVRQAPGKGLEWVSVIYSGGTTYYADSVKGRFTISRDDSKNTLYLQMNTLRDEDTAVYYCARLGDYSLKDWGQGTLVTVSS

SEQ ID NO: 29061 - protein, 96 aa, Homo sapiens
AASGFTFSSKWMTWVRLVPGQGLEWVAGTKEDGNDKYYVDSVKGRFTISRDNGKNSVDLQMNSLRVDDTAVYYCASSPPGLYMDIWGKGTTVTVSS

SEQ ID NO: 29062 - protein, 96 aa, Homo sapiens
AASGFTFSSKWMTWVRLVPGQGLEWVAGTKEDGNDKYYVDSVKGRFTISRDNGKNSVDLQMNSLRVEDTAVYYCASSPPGLYMDIWGKGTTVTVSS

SEQ ID NO: 29063 - protein, 104 aa, Homo sapiens
VSGGSISSYYWSWIRQPPGEGLEWIGYIYYTGSMNNNPSLKSRVTISLDTSKNHFSLKLNSVTAADTGVYYCARHGGVINLIRGVMKFDAFDVWGQGAKVTVSS

SEQ ID NO: 29064 - protein, 104 aa, Homo sapiens
VSGGSISSYYWSWIRQPPGEGLEWIGYIYYSGSMNNNPSLKSRVTISLDTSKNQFSLKLNSVTAADTGVYYCARHGGVINLIRGVMKFDAFDVWGQGAKVTVSS

SEQ ID NO: 29065 - protein, 104 aa, Homo sapiens
VSGGSISSYYWSWIRQPPGEGLEWIGYIYYTGNMNNNPSLKSRVTISLDTSKNHFSLKLNSVTAADTGVYYCARHGGVINLIRGVMKFDAFDVWGQGAKVTVSS

SEQ ID NO: 29066 - protein, 104 aa, Homo sapiens
VSGGSISSYYWSWIRQPPGEGLEWIGYIYYTGSMNNNPSLKSRVTISLDTSKNHFSLKLNSVTVADTGVYYCARHGGVINLIRGVMKFDAFDVWGQGAKVTVSS

SEQ ID NO: 29067 - protein, 99 aa, Homo sapiens
KGSGYIFSSYWIAWVRQKPGKGLEWMASIYPGDSDTRYSPSFQGQVTISADKSISTAYLQWSSLKASDTAIYYCARHRRIAATDHFDNWGQGNLVTVSS

SEQ ID NO: 29068 - protein, 99 aa, Homo sapiens
KGSGYIFSSYWIAWVRQKPGKGLEWMASIYPGDSDTRYSPSFQGQVTISADKSISTAYLQWSSLKASDTAMYYCARHRRIAATDHFDNWGQGNLVTVSS

SEQ ID NO: 29069 - protein, 100 aa, Homo sapiens
TVSGGSISSYSWSWIRQPPGQGLELIGSLSYGGSANYNPSLKSRVTISLDASKNQFSLQLSSVTAADTAVYYCSRSAGSHNYYYYYMDVWGKGTTVTVSS

SEQ ID NO: 29070 - protein, 100 aa, Homo sapiens
TVSGGSISSYSWSWIRQPPGQGLEWIGSLSYGGSANYNPSLKSRVTISLDASKNQFSLQLSSVTAADTAVYYCSRSAGSHNYYYYYMDVWGKGTTVTVSS

SEQ ID NO: 29071 - protein, 100 aa, Homo sapiens
TVSGGSISSYYWSWIRQPPGQGLEMIGYLYYGGSANYNPSLRSRVTISLDASKNQFSLQLSSVTAADTAVYYCSRSAGSHNYYYYYMDVWGKGTTVTVSS

SEQ ID NO: 29072 - protein, 100 aa, Homo sapiens
TVSGGSISSYSWSWIRQPPGQGLELIGSLSYGGSANYNPSLKSRVAISLDASKNQFSLQLNSVTAADTAVYYCSRSAGSHNYYYYYMDVWGKGTTVTVSS

SEQ ID NO: 29073 - protein, 98 aa, Homo sapiens
AASGFTLSNSGLSWVRQAPGKGLEWVAGILQSDDRTFYADSVKGRFTISRDRSKNTLYLQMNSLRAEDTALYYCAKDQAKDWQAFASWGQGTLVTVSS

SEQ ID NO: 29074 - protein, 98 aa, Homo sapiens
AASGFTLSNSGLSWVRQAPGKGLEWVAGVHESVDRPFYADSVKGRFTVSRDESKNTLYLQMNSLRAEDTALYYCAKDQAKDWQAFASWGQGTLVTVSS

SEQ ID NO: 29075 - protein, 98 aa, Homo sapiens
AASGFTLSNSGLSWVRQAPGKGLEWVAGLLESVDRTFYADSVKGRFTISRDKSKNTLYLQMNSLRTEDTALYYCAKDQAKDWQAFASWGQGTLVTVSS

SEQ ID NO: 29076 - protein, 98 aa, Homo sapiens
ASGFTFTGHFIHWVRQAPGQGLEWLGWINPYSGDTNYAQNFQGWVTMTRDTSISTAYMELTSLRSDDTAVYYCARQTSGSYYNDFDYWGQGTLVTVSS

SEQ ID NO: 29077 - protein, 98 aa, Homo sapiens
ASGFTFTGYFIHWVRQAPGQGLEWLGWINPYSGDTNYAQNFQGWVTMTRDTSISTAYMELTSLRSDDTAVYYCARQTSGSYYNDFDYWGQGTLVTVSS

SEQ ID NO: 29078 - protein, 103 aa, Homo sapiens
AASGFNLTSCGMSWVRQAPGKGLEWVSILSEVEGRTDYADSVRGRFTISRDSSENTLYLQMNSLRPEDTALYFCAKIGPIIAAAGSTEYFQHWGQGTLVTVSS

SEQ ID NO: 29079 - protein, 103 aa, Homo sapiens
AASGFNLTSCGMSWVRQAPGKGLEWVSILSEVEGRTDYADSVRGRFTISRDSSENTLYLQMNSLRAEDTALYFCAKIGPIIAAAGSTEYFQHWGQGTLVTVSS

SEQ ID NO: 29080 - protein, 103 aa, Homo sapiens; identical to SEQ ID NO: 29079

SEQ ID NO: 29081 - protein, 105 aa, Homo sapiens
ASGFTFSDFFMSWIRQAPGKGLEWISHISNTGTYTHYGDSVKGRFTISRDNSNNSVYLHMSNLRPDDTAKYYCARESYPESAVGTTPLARYADYWGQGDPVTVSS

SEQ ID NO: 29082 - protein, 105 aa, Homo sapiens
ASGFTFSDFFMSWIRQAPGKGLEWISHISNTGTYTHYGDSVKGRFTISRDNSNNSVYLHMSNLRPDDTAIYYCARESYPESAVGTTPLARYADYWGQGDPVTVSS

SEQ ID NO: 29083 - protein, 99 aa, Homo sapiens
TVSGASIASGDYFWTWIRQPPGKGLEWIGYIYYSGSTLYNPSLKSRVSMSMDTSKNQFSLQLTSVTAADTAVYYCVSELSGDYSSLDSWGQGALVTVSS

SEQ ID NO: 29084 - protein, 99 aa, Homo sapiens
TVSGASISSGDYFWTWIRQPPGKGLEWIGYIYYSGSTFYNPSLKSRVSMSTDTSKKQFSLQLTSVTAADTAVYYCVSELSGDYSSLDSWGQGTLVTVSS

SEQ ID NO: 29085 - protein, 99 aa, Homo sapiens
TVSGASISSGDYFWTWIRQPPGKGLEWIGYIYYSGSTFYNPSLKSRVSMSTDTSKNQFSLQLTSVTAADTAVYYCVSELSGDYSSLDSWGQGTLVTVSS

SEQ ID NO: 29086 - protein, 97 aa, Homo sapiens
AASAFTFSTYWMHWVRRVPGKGLVWISRINPDGTATTYADSVKGRFTISRDNSKNTLFLQMNSLRAEDTAVYYCVRGTLVTGGTDYWGQGTLVTVSS

SEQ ID NO: 29087 - protein, 97 aa, Homo sapiens
AASAFTFNTYWMHWVRRVPGKGLVWISRINPDGTATTYADSVKGRFTISRDNSKNTLFLQMNSLRAEDTAVYYCVRGTLVTGGTDYWGQGTLVTVSS

SEQ ID NO: 29088 - protein, 105 aa, Homo sapiens
TVSGGSISGSSYYWDWIRQPPGKGLEWIGSIYYSGVTYYKPTLKSRVSISVDTSKNQFSLQLTSVTAADTAVYYCAKCVVGATGRWNYYYYMDVWGKGTAVTVSS

SEQ ID NO: 29089 - protein, 105 aa, Homo sapiens; identical to SEQ ID NO: 29088

SEQ ID NO: 29090 - protein, 105 aa, Homo sapiens
TVSGGSISGSSYYWDWIRQPPGKGLEWMGSIYYSGVTYYKPSLKSRVSISVDTSKNQFSLQLTSVTAADTAVYYCAKCVVGATGRWNYYYYMDVWGKGTAVTVSS

SEQ ID NO: 29091 - protein, 101 aa, Homo sapiens
AASGFIFSAYTMNWVRQAPGKGLEWVSSIGTSSSDIYIADSLKGRFTMSRDNAKNSLYLQMNSLRAEDTAVYYCARGYFDSSGYYWVFDDWGQGTLVTVSS

SEQ ID NO: 29092 - protein, 101 aa, Homo sapiens; identical to SEQ ID NO: 29091

SEQ ID NO: 29093 - protein, 101 aa, Homo sapiens
AASGFTFSAYTMNWVRQAPGKGLEWVSSVGTSPTDIYIADSLKGRFTMSRDNAKNSLYLQMNSLRAEDTAVYYCARGYFDSSGYYWVFDDWGQGTLVTVSS

SEQ ID NO: 29094 - protein, 101 aa, Homo sapiens
AASGFTFSAYTMNWVRQAPGKGLEWVSSIGTSSSDIYIADSLKGRFTMSRDNAKSSLYLQMNSLRAEDTAVYYCARGYFDSSGYYWVFDDWGQGTLVTVSS

SEQ ID NO: 29095 - protein, 95 aa, Homo sapiens
AASGFTFSPYSMNWVRQAPGKGLEWVSYITGDSTTIHYADSVKGRFTISRDNAKNSVYLQMNSLRDEDTAVYYCARGYQYSFDMWGLGTMVSVSS

SEQ ID NO: 29096 - protein, 95 aa, Homo sapiens
AASGFTFSPYSMNWVRQAPGKGLEWVSYITGDSRTIHYADSVRGRFTISRDNAKNSVYLQMNSLRDEDTAVYYCARGYQYSFDMWGLGTMVSVSS

SEQ ID NO: 29097 - protein, 95 aa, Homo sapiens
AASGFTFRDYSMNWVRQVPGKGLEWVSYMTGDSKVIHYADSVKGRFIISRDNARNSLYLQMNRLRDEDAALYYCARGYQYSFDMWGQGTMVTVSS

SEQ ID NO: 29098 - protein, 101 aa, Homo sapiens
KGSGYIFTNYWIAWVRQMPGKGLEWMGIIYPADSDTTYSPSFQGQVTISVDTSITTAYLQWSSLKASDTAMYYCARLANIPVAGRNWLDPWGQGTLVTVSS

SEQ ID NO: 29099 - protein, 101 aa, Homo sapiens; identical to SEQ ID NO: 29098

SEQ ID NO: 29100 - protein, 101 aa, Homo sapiens; identical to SEQ ID NO: 29098

SEQ ID NO: 29101 - protein, 96 aa, Homo sapiens
AASGFTFSSHWMYWVRQVPGNGPVWVSRISTDGSDTTYADSVKGRFTISRDNAKNTVDLQMNSLRAEDTAVYYCARAGDGQCMDVWGKGTTVTVSS

SEQ ID NO: 29102 - protein, 96 aa, Homo sapiens
AASGFTFRSHWMYWVRQVPGNGPVWVSRISTDGTDTTYADSVKGRFTISRDNAKNTVDLQMNSLRAEDTAVYYCARAGDGQCMDVWGKGTTVTVSS

SEQ ID NO: 29103 - protein, 96 aa, Homo sapiens; identical to SEQ ID NO: 29101

SEQ ID NO: 29104 - protein, 95 aa, Homo sapiens
AASGFTFSTYWMHWVRQAPGKGLEWVSHINGDGGSINFADSVKGRFTISRDNAKNTVYLEMHSLRAEDTAVYYCARGSEYGLDSWGQGTLVTVSS

SEQ ID NO: 29105 - protein, 95 aa, Homo sapiens
AASGFTFSSYWVNWVRQAPGKGLVWVSHINGDGRIINFADSVKGRFTISRDNAKNTVYLQMNRLRAEDTAVYYCARGSEYGLDSWGQGTLVTVSS

SEQ ID NO: 29106 - protein, 95 aa, Homo sapiens
AASGFSFSNYWMHWVRQAPGKGLVWVSHIRYDGATTNFADSVKGRFTISRDTAKSTLFLQMNSLRAEDTAVYYCARGSEYGLDSWGQGTLVTVSS

SEQ ID NO: 29107 - protein, 95 aa, Homo sapiens
AASGFSFSYYWMHWVRQVPGKGLEWVSHISYDGRTTNLADSVKGRFTISRDTAKSTLFLQMNSLRAEDTAVYYCARGSEYGLDSWGQGTLVTVSS

SEQ ID NO: 29108 - protein, 95 aa, Homo sapiens
AASGFTLSSYWMHWVRQAPGKGLVWVSHINGDGRSINFADSVKGRFTISRDNAKKTLYLQMNSLRAEDTAVYYCARGSEYGLDSWGQGTLVTVSS

SEQ ID NO: 29109 - protein, 95 aa, Homo sapiens
AASGFSFSNYWMHWVRQAPGKGLVWVSHISYDGRTTNFADSVRGRFTISRDTAKSTLFLQMNSLRAEDTAVYYCARGSEYGLDSWGQGTLVTVSS

SEQ ID NO: 29110 - protein, 95 aa, Homo sapiens
AASGFTFSSYWMQWVRQGPGKGLESFSRINHDGSRTDYADSVKGRFTISRDNAKNMVFLQMNSLRVEDTAVYYCATDVWGRGAYWGQGTLVAVSS

SEQ ID NO: 29111 - protein, 95 aa, Homo sapiens
AASGFTFSSYWMQWVRQGPGKGLESFSRISHEGSRSDYADSVKGRFTISRDNAKNTLFLEMNSLTVEDTAVYYCATDVWGRGAYWGQGTLVAVSS

SEQ ID NO: 29112 - protein, 100 aa, Homo sapiens
ASGFAFSDYGMNWVRQAPGKGLEWVAYLSRSSKISHVADSVKGRFTISRDNGKNALFLQMDSLRDEDTAVYYCARTTNYHNATAYYQDFWGQGTRVTVSS

SEQ ID NO: 29113 - protein, 100 aa, Homo sapiens; identical to SEQ ID NO: 29112

SEQ ID NO: 29114 - protein, 100 aa, Homo sapiens
ASGFAFSDYGMNWVRQAPGKGLEWVAYLSRSSKISHVADSVKGRFTISRDNGKNTLFLQMDSLRDVDTAVYYCARTTNYHNATAYYQDFWGQGTRVTVSS

SEQ ID NO: 29115 - protein, 103 aa, Homo sapiens
AASGFTVRSNYLTWVRQAPGKGLEWVSVLYSNGNTYYAESIKGRFSISRLISENTLYLQMNSLRPEDTAVYYCAGSSRDTHSGFYLDDAFDIWGQGTMVTVSS

SEQ ID NO: 29116 - protein, 103 aa, Homo sapiens
VASGFSVSTKYLTWVRQAPGKGLEWVSVIYTAGNTYYPESFKGRFFISRSKSENTLYLLMNSLRPEDTAVYYCAGSSRDTHSGFYLDDAFDIWGQGTMVTVSS

SEQ ID NO: 29117 - protein, 93 aa, Homo sapiens
SGFRLSDFYMAWIRQAPGKGLEWVSSIGKTSEFSHYAASVKGRFTISRDDAKNSLYLQMDDLRAEDTARYFCARSVSFYFDLWGHGSVVTVSS

SEQ ID NO: 29118 - protein, 93 aa, Homo sapiens
SGFRLTDFYMAWIRQAPGKGLEWVSSIGRTSEFSHYAVSVKGRFTISRDDANNSLYLQMDDLRAEDTARYFCARSVSFYFDLWGHGSVVTVSS

SEQ ID NO: 29119 - protein, 101 aa, Homo sapiens
TVSGGSISSGGYYWSWVRQPPGKGLEWIGYIYYSGSTYYNPSLKSRVTISVDTSKNQFSLRLSSVTAADTAVYYCARDSSREYSGYYFDYWGQGTLVTVSS

SEQ ID NO: 29120 - protein, 101 aa, Homo sapiens
TVSGGSISSGGYYWSWIRQPPGKGLEWIGYIYYSGSTYYNPSLKSRVTISVDTSKNQFSLRLNSVTAADTAVYYCARDSSREYSGYYFDYWGQGTLVTVSS

SEQ ID NO: 29121 - protein, 99 aa, Homo sapiens
ASGFTFSNYAMSWVRQPPGKGLEWVSTISGSGDKTFSADSAKGRFTISRDASKNIVTLEMNSLRLEDTGLYFCAKDQHGYAGGDDGFDFWGPGTMVTVS

SEQ ID NO: 29122 - protein, 100 aa, Homo sapiens
AASGFTFSNYAMSWVRQPPGKGLEWVSTISGSGDRTFSADSAKGRFTISRDASMNIVTLEMNSLRLEDTGLYFCAKDQHGYAGGDDGFDFWGPGTMVTVS

SEQ ID NO: 29123 - protein, 101 aa, Homo sapiens
AASGFNFSPYSMNWVRQAPGKGLESVSSISGSSNYIYYADSVKGRFTISRDNAKNSLYLQMNSLRAEDTAVYYCARDPELHHYNYYYMDVWGKGTTVTVSS

SEQ ID NO: 29124 - protein, 101 aa, Homo sapiens; identical to SEQ ID NO: 29123

SEQ ID NO: 29125 - protein, 98 aa, Homo sapiens
AVSGGFINRDDWWSWVRQTPGKGLEWIGEIHESGRTNYNPSLKSRVSMSVDKSNNQFSLKLTSVIVADTAMYYCATTSARAAGALSYWGQGTLVTVPS

SEQ ID NO: 29126 - protein, 97 aa, Homo sapiens
VSGGFINRDDWWSWVRQTPGKGLEWIGEIHESGRTNYNPSLKSRVSMSVDKSNNQFSLKLTSVIVADTAMYYCATTSARAAGALSYWGQGTLVTVPS

SEQ ID NO: 29127 - protein, 100 aa, Homo sapiens
AASGFTFSSYEMNWVRQAPGKGLEWVSYISSSGSTIYYADSLKGRLIISRDNAKNSLYLQMSSLRVEDTAVYYCVRDLSWSGRKWHFDLWGRGTLVTVSS

SEQ ID NO: 29128 - protein, 100 aa, Homo sapiens
AASGFTFSSYEMNWVRQTPGKGLEWVSYISGSGSPIYYADSLKGRLIISRDNAKNSLYLQMNSLRAEDTAVYYCVRDLSWSGRKWHFDLWGRGTLVTVSS

SEQ ID NO: 29129 - protein, 100 aa, Homo sapiens
AASGFTFSSYEMNWVRQAPGKGLEWVSYISGSGSTIYYADSLKGRLIISRDNAKNSLYLQMSSLRVEDTAVYYCVRDLSWSGRKWHFDLWGRGTLVTVSS

SEQ ID NO: 29130 - protein, 100 aa, Homo sapiens
AASGFTFSSYEMNWVRQAPGKGLEWVSYISSSGSTIYYADSLKGRLIISRDNAKNSLYLQMSSLRAEDTAVYYCVRDLSWSGRKWHFDLWGRGTLVTVSS

SEQ ID NO: 29131 - protein, 100 aa, Homo sapiens; identical to SEQ ID NO: 29130

SEQ ID NO: 29132 - protein, 99 aa, Homo sapiens
SGYTFTNYGINWMRQAPGQGLEWMGWISGYNGNTNYAQKFQGRVTMTTDTSTSTAYMELRSLRSDDTAVYYCGSGTRGVSGNYAYSDYWGQGTLVTVSS

SEQ ID NO: 29133 - protein, 99 aa, Homo sapiens
SGYTFTNYGINWMRQAPGQGLEWMGWISGYNANTNYAQKFQGRVTMTTDTSTSTAYMELRSLRSDDTAVYYCGSGTRGVSGNYAYSDYWGQGTLVTVSS

SEQ ID NO: 29134 - protein, 94 aa, Homo sapiens
ASGFTFSTYGMHWVRQPPGKGLEWVTVIWYDGSNKFYADSVKGRFSISRDNSKNTLYLQMNSLRAEDTAVYYCARETNNYYDYWGQGTLVTVSS

SEQ ID NO: 29135 - protein, 95 aa, Homo sapiens
AASGFTFSSYGMHWVRQPPGKGLEWVTVIWYDGSNKFYADSVKGRFSISRDNSKNTLYLQMNSLRAEDTAVYYCARETNNYYDYWGQGTLVTVSS

SEQ ID NO: 29136 - protein, 95 aa, Homo sapiens
AASGFSFSTYGMHWVRQPPGKGLEWVTVIWYDGSNKFYADSVKGRFSISRDNSKNTLYLQMNSLRAEDTAVYYCARETNNYYDYWGQGTPVTVSS

SEQ ID NO: 29137 - protein, 95 aa, Homo sapiens
AASGFTFSTYGMHWVRQPPGKGLEWVTVIWYDGSNKFYADSVKGRFSISRDNSKNTLYLQMNSLRAEDTAVYYCARETNNYYDYWGQGTLVTVSS

SEQ ID NO: 29138 - protein, 103 aa, Homo sapiens
TVSGGSINSNSYYWGWIRQPPGKGLEWIASFYSSGATYYNPSLKSRVTKSVDTSENHFSLSLTSVTAADTAVYYCARRSKIEPPGRAYYFDSWGQGILVTVAS

SEQ ID NO: 29139 - protein, 103 aa, Homo sapiens
NVSGGSINSNSYYWGWIRQPPGKGLEWIGSIYPSGATYYNPSLKSRVIKSVDKSDYHFSLSLTSVTAADTAVYYCARRSKIEPPGRAYYFDSWGQGILVTVAS

SEQ ID NO: 29140 - protein, 98 aa, Homo sapiens
AASGFTFSNYYMTWVRQSPGKGLEWVANIKKDGRDKDYVDSVKGRFTISRDNAKNSLYLQMNSLRVEDTAVYYCTKGGMTSSWFWVDWGQGTLVTVSS

SEQ ID NO: 29141 - protein, 98 aa, Homo sapiens
AASGFTFSNYWMTWVRQSPGKGLEWVANIKQDGSEKYYVDSVKGRFTISRDNAKNSLYLQMNSLRDDDTALYHCTKGGMTSSWFWVDWGQGTLVTVSS

SEQ ID NO: 29142 - protein, 98 aa, Homo sapiens
AASGFTFSNYYMTWVRQSPGKGLEWVANIKKDGSEKDYVDSVKGRFTISRDNAKNSLYLQMNSLRAEDTAVYYCTKGGMTSSWFWVDWGQGTLVTVSS

SEQ ID NO: 29143 - protein, 98 aa, Homo sapiens
AASGFTFGSYWMTWVRQSPGKGLEWVANIKKDGNEKYYVDSVKGRFTISRDNTKNSLYLQMNSLRAEDTAVYFCTKGGMTSSWFWVDWGQGTLVTVSS

SEQ ID NO: 29144 - protein, 106 aa, Homo sapiens
ASGGTLSSFAIGWVRQGPGQGLEWVGGVIPILGRTDYAERFQGRVTITADEPRNGAYMELSGLTPEDTAVYFCARGRYYDVGGDSQMGRYYLFDRWGQGTLVTVSS

SEQ ID NO: 29145 - protein, 106 aa, Homo sapiens
ASGGTLSSFAIGWVRQGPGQGLEWVGGVIPILGRTDYAERFQGRVTITADEPRNGAYMELNGLTAEDTAVYFCARGRYYDVGGDSQMGRYYLFDRWGQGTLVTVSS

SEQ ID NO: 29146 - protein, 103 aa, Homo sapiens
SASGFTFSSSSMHWVRQAPGKGLEYVAPFSSNGGSTYYADSVKGRFTMSRDNSKNTQYLQMSSLRAEDTAVYYCVKATGYKVGSFKFYYMDVWGKGTTVTVSS

SEQ ID NO: 29147 - protein, 103 aa, Homo sapiens; identical to SEQ ID NO: 29146

SEQ ID NO: 29148 - protein, 95 aa, Homo sapiens
TVSGGSVSSKYYWGWIRQSPGKGLEWIASFLYNGRSYFNPSLKSRVTISTDTSKNQFSLNLTSVTAADTAIYYCARQGVVWCPRNWGQGTLVTVS

SEQ ID NO: 29149 - protein, 95 aa, Homo sapiens
TVSGGSVSSKYYWGWIRQSPGKGLEWIASFLYNGRSYFNPSLKSRVTISTDTSKNQFHLNLTSVTAADTAIYYCARQGVVWCPRNWGQGTLVTVS

SEQ ID NO: 29150 - protein, 95 aa, Homo sapiens; identical to SEQ ID NO: 29149

SEQ ID NO: 29151 - protein, 95 aa, Homo sapiens
TVSGGSVSSKYYWGWIRQSPGKGLEWIASFLYNGRSYFNPFLKSRVTISTDTSKNQFHLNLTSVTAADTAIYYCARQGVVWCPRNWGQGTLVTVS

SEQ ID NO: 29152 - protein, 97 aa, Homo sapiens
ISGDSVSSETSAWNWFRQSPSRGLEWLGRTYYRTKWNNDFSSSVRGRIDVNPDTSKNQFSLHLYSVTPEDAATYYCAREGVWALDFWGQGTRVTVSS

SEQ ID NO: 29153 - protein, 97 aa, Homo sapiens
ISGDSVSSDTSAWNWFRQSPSRGLEWLGRTYYRTKWNNDFSSSVRGRIDVNPDTSKNQFSLHLHSVTPEDAAIYYCAREGVWALDFWGQGTRVTVSS

SEQ ID NO: 29154 - protein, 98 aa, Homo sapiens
TVSGGSIGSYYWSWIRQPPGKGLEWIGHIYYDGSTNSNPSLKSRVTISVDTSKNQFSLKVSSVTAADTAIYYCARIVSGYYYYYMDVWGKGTTVTVSS

SEQ ID NO: 29155 - protein, 98 aa, Homo sapiens
TVSGGSIGTYYWSWIRQPPGKGLEWLGHIYYSGTTNYNPSLKSRVTISVDTSKNQFSLKLSSVTAADTAVYYCARIVSGYYYYYMDVWGKGTTVTVSS

SEQ ID NO: 29156 - protein, 99 aa, Homo sapiens
ASGYTFSNYYMQWVRQAPGQGLEWMGIINPTTGSTSYSEKFQGRVTMTRDTSTSTVYMDLSSLRSEDTAVYYCARDPGLRGDYYYMDVWGKGTTVTVSS

SEQ ID NO: 29157 - protein, 99 aa, Homo sapiens
ASGYTFTSYYIHWVRQAPGHGLEWMGIINPTSGSTSYAQNFQGRVTMTRDTSTSTVYMELSSLRSEDTAVYYCARDPGLRGDYYYMDVWGKGTTVTVSS

SEQ ID NO: 29158 - protein, 99 aa, Homo sapiens
ASGYTFTNYYIQWVRQAPGHGLEWMGIINPTSGSTSYAQNSQGRVTMTRDTSTSMVYMELSSLRSEDTAVYYCARDPGLRGDYYYMDVWGKGTTVTVSS

SEQ ID NO: 29159 - protein, 95 aa, Homo sapiens
AASGFNFNIYSMNWVRQAPGKGLEWISYINGPSTAIHYADSVRGRFTISRDNGKNAVYLQMNNLRDDDTAVYYCTRGLQYSSDFWGQGTLVTVSS

SEQ ID NO: 29160 - protein, 94 aa, Homo sapiens
ASGFNFKIYSMNWVRQAPGKGLEWVSYITGGSNVLHYADSVKGRFTISRDNAKNSLYLHMNSLRDDDTAVYYCTRGLQYSSDFWGQGILVTVSS

SEQ ID NO: 29161 - protein, 95 aa, Homo sapiens
AASGFTFSSYSMNWVRQAPGKGLEWISYITGPSSTIHYADSVRGRFTISRDNAKNSVYLQMSSLRDEDTAVYYCTRGLQYSSDFWGQGTLVSVSS

SEQ ID NO: 29162 - protein, 95 aa, Homo sapiens
AASGFNFNIYSMNWVRQAPGKGLEWISYITSNEKTIHYADSVRGRFSISRDNARNSLYLQMNSLRDEDTAVYYCTRGLQYSSDFWGHGNLVTVSS

SEQ ID NO: 29163 - protein, 95 aa, Homo sapiens
AASGFNFKVYSMNWVRQAPGKGLEWIAYINGPSNALHYADSVRGRFTISRDNAKNSVSLQMNSLRDEDTALYYCTRGLQYSSDFWGQGTLVTVSS

SEQ ID NO: 29164 - protein, 100 aa, Homo sapiens
AASGFSFSTYGMHWVRQAPGKGLEWVAIISYDGSWQSYADSVKGRLTISRDNSQNTLYLQMSSLRPEDTATYYCTKDFTWVVASTGFDSWGQGTLVTVSS

SEQ ID NO: 29165 - protein, 100 aa, Homo sapiens
AASGFTFSHYGMHWVRQAPGKGLEWVALIANDGSWESYADSVRGRLTISRDNSQNTLYLQVSSLRPEDTATYYCTKDFTWVVASTGFDSWGQGTLVTVSS

SEQ ID NO: 29166 - protein, 96 aa, Homo sapiens
AASGFSLRNYEMNWVRQVPGKGLERVAFISHGTTTMYYGDSVRGRFTISRDDAKNSLYLQMNNLRVEDTAIYYCARDNGAAAADEWGQGTLVTVSS

SEQ ID NO: 29167 - protein, 96 aa, Homo sapiens
AASGFSLRNYEMNWVRQVPGKGLERVAFISHGTTTMYYGDSVRGRFTISRDDAKNTLYLQMNSLRVEDTAIYYCARDNGAAAADEWGQGTLVTVSS

SEQ ID NO: 29168 - protein, 96 aa, Homo sapiens; identical to SEQ ID NO: 29167

SEQ ID NO: 29169 - protein, 96 aa, Homo sapiens
AASGFSLRRYEMNWVRQVPGKGLERVAFISHDTPTMYYGDSVRGRFTISRDDAKNSLYLQMNSLRVEDTGIYYCARDNGAAAADEWGRGTLVTVSS

SEQ ID NO: 29170 - protein, 96 aa, Homo sapiens
AASGFSLRNYEMNWARQVPGKGLERVAFISHGTTTMYYGDSVRGRFTISRDDAKNTLYLQMNSLRVEDTAIYYCARDNGAAAADEWGQGTLVTVSS

SEQ ID NO: 29171 - protein, 105 aa, Homo sapiens
KGSGYNFTNYWITWVRQMPGKGLEWMGRIDPTDSSTKYSPSFQGHVTISADESFSTAYLQWSSLRASDVAMYYCARVSRQSPVRGGYYYHYMDVWGKGTTVIVSS

SEQ ID NO: 29172 - protein, 104 aa, Homo sapiens
GSGYNFTNYWITWVRQMPGKGLEWMGRIDPTDSSTKYSPSFEGHVTLSVDESFSTAYLQWSSLKASDVAMYYCARVSRQSPVRGGYYYHYMDVWGKGTTVIVSS

SEQ ID NO: 29173 - protein, 105 aa, Homo sapiens
TVSGGSVSSSSYYWTWIRQPPGKGLEWIGYVYYSGITNYNPSLKSRLTIAVDTSKNQFSLKLRSVTPADTAVYYCAREFLHVSPDSGGYNWFDPWGQGSLVTVSS

SEQ ID NO: 29174 - protein, 105 aa, Homo sapiens
TVSGVSVSSGSFYWTWIRQPPGKGLEWVGYVYYSGITNYNPSLKSRLTIAVDTSKNQFSLKLTSVTAADTAVYYCAREFLHVSPDSGGYNWFDPWGQGTLVTVSS

SEQ ID NO: 29175 - protein, 105 aa, Homo sapiens
TVSGGSVSSGSYYWTWIRQPPGKGLEWMGYIYYGGITNYNPSLKSRLTMTVDTSKNQFSLRLSSVTAADTAVYYCAREFLHVSPDSGGYNWFDPWGQGTLVTVSS

SEQ ID NO: 29176 - protein, 99 aa, Homo sapiens
AASGFTVSSNYMIWVRQAPAKGLEWVSLISSGSGGSTYYAESVKGRFTISRDNSKNTLYLQMNSLRAEDTAVYYCARMYISGEGYFDLWGRGTLLTVSS

SEQ ID NO: 29177 - protein, 99 aa, Homo sapiens
AASGFTVSSNYMIWVRQAPAKGLEWVALISSGSGRSTYYAESVKGRFTISRDTSKNTLYLQMNSLRAEDTAIYYCARMYISGEGYFDLWGRGTLLTVSS

SEQ ID NO: 29178 - protein, 99 aa, Homo sapiens
AASGFTVSSNYMIWVRQAPAKGLEWVSLISSGSGGSTFYAESVKGRFTISRDNSKNTLYLQMNSLRAEDTAVYYCARMYISGEGYFDLWGRGTLLTVSS

SEQ ID NO: 29179 - protein, 106 aa, Homo sapiens
AVYGGSFSGYYWSWIRQPPGKGLEWIGEINHGGGTNYNPSLKSRVAISLATSKNQFSLKLNSVTAADTAVYYCARGGYHSTRRHPPRKRDYYIDVWGTGTTVTVSS

SEQ ID NO: 29180 - protein, 106 aa, Homo sapiens; identical to SEQ ID NO: 29179

SEQ ID NO: 29181 - protein, 101 aa, Homo sapiens
ATSGFSFRTFGMHWVRQAPGKGPEWVAVISNDGYSKHYRDSVNGRFTISRDNSKNTLDLQMNSLRAEDTAVYYCVKGDYDRSHYFTPPMEIWGQGTKVTVS

SEQ ID NO: 29182 - protein, 101 aa, Homo sapiens; identical to SEQ ID NO: 29181

SEQ ID NO: 29183 - protein, 98 aa, Homo sapiens
AASGFSFSTYSMTWVRQAPGKGLEWLSYISYGSTYIYYADSVQGRFTISRDSARNSVYLQMSGLRDEDTAVYYCARVVTGTEGYFDYWGQGTLVTVSS

SEQ ID NO: 29184 - protein, 98 aa, Homo sapiens
AVSGFTFSSYSMSWVRQAPGKGLEWVSYISYGSSTIYYADSVKGRFTISRDSAKNSLYLQMNGLRDEDTAVYYCARVVTGTEGYFDYWGQGTLVTVSS

SEQ ID NO: 29185 - protein, 102 aa, Homo sapiens
AASGFPFSTYGMHWVRQAPGKGLEWVAVISYDGRNKYYADSVRGRFTISRDNSENTLYLQMNSLRAEDTAVYYCAKDSLQNVVIVPTAIPVWGQGTLVTVSS

SEQ ID NO: 29186 - protein, 102 aa, Homo sapiens
AASGFTFSSYGMHWVRQAPGKGLEWVAVISYDGRNKYYADSVRGRFSISRDNSENTLYLQMNSLRAEDTAVYYCAKDSLQNVVIVPTAIPVWGQGTLVTVSS

SEQ ID NO: 29187 - protein, 102 aa, Homo sapiens
AASGFTFSSYGMHWVRQAPGKGLEWVAVISYDGRNKYYADSVRGRFTISRDNSENTLYLQMNSLRAEDTAVYYCAKDSLQNVVIVPTAIPVWGQGTLVTVSS

SEQ ID NO: 29188 - protein, 99 aa, Homo sapiens
AVSGGSFSGYYWSWIRQPPGEGLEWIGDINHSGSTNYNPSLKSRLTISVDTSKNQFSLKLTSVTAADTAVYFCARGRSAMGPYSVFDYWGQGTLVTVSS

SEQ ID NO: 29189 - protein, 99 aa, Homo sapiens
AVSGGSFSGYYWSWIRQPPGEGLEWIGDINHSGSTNYNPSLKSRLTISVDAPKNQFSLKVTSVTAADTAVYFCARGRSAMGPYSVFDYWGHGTLVTVSS

SEQ ID NO: 29190 - protein, 99 aa, Homo sapiens
AASGFTFSNYAMHWVRQAPGKGLEWMAVTSYDGRNYYYADSVKGRFTISRDNSKNTLYLQMNSLRAEDTAVYYCARGAGGTCRYYFDHWGQGTLVTVSS

SEQ ID NO: 29191 - protein, 98 aa, Homo sapiens
AASGFTFSNYAMHWVRQAPGKGLEWMAVTSYDGRNYYYADSVKGRFTISRDNSKNTLYLQMNSLRAEDTAVYYCARGAGGTCRYYFDHWGQGTLVTVS

SEQ ID NO: 29192 - protein, 98 aa, Homo sapiens
ASGFTFSNYAMHWVRQAPGKGLEWMAVTSYDGRNYYYADSVKGRFTISRDNSKNTLYLQMNSLRAEDTAVYYCARGAGGTCRYYFDHWGQGTLVTVSS

SEQ ID NO: 29193 - protein, 101 aa, Homo sapiens
AASGFTFSTYWMSWVRQAPGKGLEWVANIKFDGSEKYYVDSVKGRFTISRDNAKNSLYLQMNSLGAEDTALYYCASQYCSGGSCSPARGNWGQGTLVTVSS

SEQ ID NO: 29194 - protein, 101 aa, Homo sapiens
AASGFTFSSYWMSWVRQAPGKGLEWVANIKFDGSEKYYVDSVKGRFTISRDNAKNSLYLQMNSLGAEDTALYYCASQYCSGGSCSPARGNWGQGTLVTVSS

SEQ ID NO: 29195 - protein, 101 aa, Homo sapiens
AASGFTFSTYWMSWVRQAPGKGLEWVANIKFDGSETYYVDSVKGRFTISRDNAKKSLYLQMNSLGAEDTAVYYCASQYCSGGSCSPARGNWGQGTLVTVSS

SEQ ID NO: 29196 - protein, 99 aa, Homo sapiens
ASGYTFTSYGISWVRQAPGQGLEWMGWISDYNGNTNYAQKVQGRVTMTTDTSTNTASMELRSLRSDDTAMYYCARDLSGTGGGVHFQYWGQGTLVTVSS

SEQ ID NO: 29197 - protein, 99 aa, Homo sapiens
ASGYTFTSYGISWVRQAPGQGLEWMGWISAYNGNTNYAQKVQGRVTMTTDTSTNTASMEVRSLRSDDTAMYYCARDLSGTGGGVHFQYWGQGTLVTVSS

SEQ ID NO: 29198 - protein, 99 aa, Homo sapiens
ASGYTFTSYGISWVRQAPGQGLEWLGWISSYNGNTNYAQKVQGRVTMTTDTSTNTASMELRSLRSDDTAMYYCARDLSGTGGGVHFQYWGQGTLVTVSS

SEQ ID NO: 29199 - protein, 105 aa, Homo sapiens
KGSGYSFSNYWIAWVRQMPGKGLELMGIIYPGDSDTRYSPSFQGQVIISADKSINTAYLQWRSLKASDTATYYCARQGCPSAPCYSFVYYYMDVWGIGTTVTVSS

SEQ ID NO: 29200 - protein, 105 aa, Homo sapiens
KGSGYSFSNYWIAWVRQMPGKGLELMGIIYPGDSDTRYSPSFQGQVTISADKSINTAYLQWRSLKASDTATYFCARQGCPSAPCYSFVYYYMDVWGIGTTVTVSS

SEQ ID NO: 29201 - protein, 98 aa, Homo sapiens
AVSGGSLSGSFWTWIRQTPRKGLEWIGAINDRGIRNYHPSLSSRATVSADTSQNQVLLHLTSVTDADTGVYYCARLSSGRDYYYLDVWGKGTPVTVSS

SEQ ID NO: 29202 - protein, 98 aa, Homo sapiens
AVSGGSLSGSFWTWIRQTPRKGLEWIGAINDRGIRNYHPSLSSRATVSADTSQNQVLLHLSSVTDADTGVYYCARLSSGRDYYYLDVWGKGTPVTVSS

SEQ ID NO: 29203 - protein, 93 aa, Homo sapiens
EVFGFTFSTYSMSWVRQAPGKGLEWVSVITATGTTYYADSVWGRFTISRDNSKNTLYLQMNSLRDEDTATYYCAKKIGHFDYWGQGTLVTVSS

SEQ ID NO: 29204 - protein, 93 aa, Homo sapiens
EVSGFTFSTYSMSWVRQAPGKGLEWVSVITATGSTYYADSVRGRFTISRDNSKNTLYLQMNSLRAEDTAIYYCAKKIGHFDYWGQGTLVTVSS

SEQ ID NO: 29205 - protein, 97 aa, Homo sapiens
TVSGGSISSSSYYWGWIRQPPGKGLEWIGNIFYSGSTYYNPSLKSRVTISVDTSKNHFSLKLSSVTAADTALYYCARRGGGKAFDYWGQGPLVTVSS

SEQ ID NO: 29206 - protein, 97 aa, Homo sapiens
TVSGGSISSTSYYWGWIRQPPGKGLEWIGNILYSGSTYYNPSLKSRVTISVDTSKNQFSLKLSSVTAADTALYYCARRGGGKAFDYWGQGPLVTVSS

SEQ ID NO: 29207 - protein, 97 aa, Homo sapiens
TVSGGSISSTSYYWGWIRQPPGRGLEWIGNIFYSGSTYYNPSLKSRVTISVDTSKNHFSLKLSSVTAADTALYFCARRGGGKAFDYWGQGTLVTVSS

SEQ ID NO: 29208 - protein, 97 aa, Homo sapiens
TVSGGSISSTSYYWGWIRQPPGKGLEWIGNIFYSGSTYYNPSLKSRVTISVDTSKNHFSLKLSSVTAADTALYYCARRGGGKAFDYWGQGPLVTVSS

SEQ ID NO: 29209 - protein, 97 aa, Homo sapiens
TVSGGSISSSSYYWGWIRQPPGRGLEWIGNIFYSGSTYYNPSLKSRVTISVDTSKNHFSLKLSSVTAADTALYFCARRGGGKAFDYWGQGTLVTVSS

SEQ ID NO: 29210 - protein, 96 aa, Homo sapiens
VSGDSISTSSYYWGWIRQPPGKGLEWIGNIFNSGSTYYNPSLKSRVTISVDTSKNHFSLKLSSVTAADTALYYCARRGGGKAFDYWGQGPLVTVSS

SEQ ID NO: 29211 - protein, 97 aa, Homo sapiens
TVSGGSVSSTSYYWGWIRQSPGKGLEWIGNIFYSGSTYYNPSLKSRVTISVDTSKNHFSLELNSLTAADTALYYCARRGGGKAFDYWGQGILVTVSS

SEQ ID NO: 29212 - protein, 97 aa, Homo sapiens; identical to SEQ ID NO: 29208

SEQ ID NO: 29213 - protein, 100 aa, Homo sapiens
GVSGGSFSGYYWTWIRQSPRQGLEWIGEINHLARADGNPSLKSRLTISVDTSNRQFSLNLTSVTAADTAVYYCARGSRPITSPGRAFDVWGRGTMVTVSS

SEQ ID NO: 29214 - protein, 100 aa, Homo sapiens
GVSGGSFSGYYWTWIRQSPRQGLEWIGEINHLARADGNPSLKSRLTISVDTSKRQFSLNLTSVTAADTAVYYCARGSRPITSPGRAFDVWGQGTMVTVSS

SEQ ID NO: 29215 - protein, 105 aa, Homo sapiens
KGSGYSFTSYWIAWVRQMPGKGLEWMGIIYPGDSDTRYSPSFQGQVTISADKSISTAYLQWSSLKASDTAMYYCARRGYSSGFIGVHYYYYMDVWGKGTTVTVSS

SEQ ID NO: 29216 - protein, 105 aa, Homo sapiens; identical to SEQ ID NO: 29215

SEQ ID NO: 29217 - protein, 98 aa, Homo sapiens
SGFTFDEYAIHWVRQAPGKGLEWVSRISGDSSFIGYADSVKGRFTISRDNAMQSLYLQMNSLRPEDTAVYYCTKDRYCSGGICPTDYWGQGTLVTVSS

SEQ ID NO: 29218 - protein, 100 aa, Homo sapiens
VGSGFSFDEYAMHWVRQAPGKGLEWVSRISGNGDTIGYADSVKGRFTISRDNAMQSLYLQMNSLRPEDTAFYFCTKDRYCSGGICPTDYWGQGTLVTVSS

SEQ ID NO: 29219 - protein, 100 aa, Homo sapiens; identical to SEQ ID NO: 29218

SEQ ID NO: 29220 - protein, 100 aa, Homo sapiens; identical to SEQ ID NO: 29218

SEQ ID NO: 29221 - protein, 99 aa, Homo sapiens
SVSGGSISDDYWSWIRQPPGKGLEWIGYIFYSGSVNSNPSLKSRLTISVVTSKNQFSLKLTSVTPADTAVYYCARSPQDLGSGYSFDYWGQGALVTVSS

SEQ ID NO: 29222 - protein, 99 aa, Homo sapiens
TVSGGSISDYYWSWIRQPPGKGLEWIGYIFYSGSVNSNPSLKSRLTISLVTSKNQFSLKLTSVTPADTAVYYCARSPQDLGSGYSFDYWGQGALVTVSS

SEQ ID NO: 29223 - protein, 97 aa, Homo sapiens
ATSGFSFSYHAMDWVRRAPGKGLEWVSSISSTPTYVSYADSVKGRFTISRDNAKNSVYLRMDSLRVDDTAVYYCAREAYGYYHLDVWGKGTTVTVSS

SEQ ID NO: 29224 - protein, 97 aa, Homo sapiens
ATSGFSFSYHAMDWVRRAPGKGLEWVSSISSTPTYVSYADSVKGRFTISRDNAKNSVFLQMDSLRVDDTAVYYCAREAYGYYHLDVWGKGTTVTVSS

SEQ ID NO: 29225 - protein, 103 aa, Homo sapiens
AASGFTFSSYWMHWVRQAPGKGLVWVSLINSDGTTTLYADSVKGRFTISRDNAKNTLNLQMNSLRAEDTAVYYCVRDVGVRCGSDWCKWFDPWGQGALVTVSS

SEQ ID NO: 29226 - protein, 103 aa, Homo sapiens
AASGFTFSSYWMHWVRQAPGKGLVWVSHINSDGSRTNYADSVKGRFTISRDNAKNTLYLQMNSLRAEDTAVYYCVRDVGVRCGSDWCKWFDPWGQGTLVTVSS

SEQ ID NO: 29227 - protein, 103 aa, Homo sapiens
AASGFTFSSYWMHWVRQAPGKGLVWVSRINFDGSSTNYADSVKGRFTISRDNAKNTLYLQMNSLRAEDTAVYYCVRDVGVRCGSDWCKWFDPWGQGTLVTVSS

SEQ ID NO: 29228 - protein, 98 aa, Homo sapiens
ASGYTFGTYTMHWVRQAPGQRLEWMGCINAGNGNTKYSQNFQGRVTITRDTSASTAYMDLSSLRSEDTAVYYCARLYSSSSGDVFDYWGQGTLVTVSS

SEQ ID NO: 29229 - protein, 98 aa, Homo sapiens
ASGYTFSTYTMHWVRQAPGQRLEWMGCINAGNGNTKYSQNFQGRVTITRDTSASTAYMDLSSLRSEDTAVYYCARLYSSSSGDVFDYWGQGTLVTVSS

SEQ ID NO: 29230 - protein, 98 aa, Homo sapiens
ASGYTFSTYAMHWVRQAPGQGLEWMGCINAGNGNTKYSQNFQGRVTITRDTSASTAYMDLSSLRSEDTAVYYCARLYSSSSGDVFDYWGQGTLVTVSS

SEQ ID NO: 29231 - protein, 103 aa, Homo sapiens
AASGFPFSSYSINWVRQAPGKGLEWVSSISGSGSDKYYADSVKGRFTISRDNAKNSLFLQLNNLRAEDTAVYSCARGFYDLNRGYRRFYMDVWGKGTTVTVSS

SEQ ID NO: 29232 - protein, 103 aa, Homo sapiens
AASGFPFGSYSMNWVRQAPGKGLEWVASITGDSSYKNYADSLKGRLTISRDNAENSLYLQLDGLRAEDTAVYSCARGFYDLNRGYRRFYMDVWGKGTTVTVSS

SEQ ID NO: 29233 - protein, 103 aa, Homo sapiens
AASGFPFSSYIMNWVRQAPGKRLEWVSSISGSSGDKFYADSVRGRFTISRDNTKNSLYLQLSSLSAEDTAVYSCARGFYDLNRGYRRFYMDVWGKGTTVTVSS

SEQ ID NO: 29234 - protein, 103 aa, Homo sapiens
AASGFPFSSYIMNWVRQAPGKGLEWVSSISGSSGDKYYADSVKGRFTISRDNAKNSLFLQLSSLRAEDTAVYSCARGFYDLNRGYRRFYMDVWGKGTTVTVSS

SEQ ID NO: 29235 - protein, 103 aa, Homo sapiens
AASGFPFSSYIINWVRQAPGKGLEWVSSISGSGSDKYYADSVKGRFTISRDNAKNSLFLQLNNLRAEDTAVYSCARGFYDLNRGYRRFYMDVWGKGTTVTVSS

SEQ ID NO: 29236 - protein, 106 aa, Homo sapiens
AVSGGSISSSDWWSWVRQPPGRGLEWIGEISHTGTTNYNPSLKSRVTISVDKSNNQFSLKLNSVTAADTAVYYCAQSIGEPFAFRVVRGIRPFDIWGQGTLITVSS

SEQ ID NO: 29237 - protein, 106 aa, Homo sapiens
AVSGASISSSDWWSWVRQPPGGGLEWIGEISHTGTTNYNPSLKSRVTISVDKSNNQFSLKLNSVTAADTAVYYCAQSIGEPFAFRVVRGIRPFDIWGQGTLITVSS

SEQ ID NO: 29238 - protein, 106 aa, Homo sapiens
AVSGGSISSSDWWSWVRQPPGRGLEWIGEISHTGTTNYNPSLKSRVTISVDKSNNQFSLKLNSVTAADTAVYFCAQSIGEPFAFRVVRGIRPFDIWGQGTLITVSS

SEQ ID NO: 29239 - protein, 103 aa, Homo sapiens
AASGFIFSGYGMHWVRQAPGKGPEWVAVIWSDGSNEFYGDFVKGRLTISRDNSQNTLFLQMNSLRVEDTAVYYCARDGNYFDTAGYSYYFDLWGQGTRVTVSS

SEQ ID NO: 29240 - protein, 103 aa, Homo sapiens; identical to SEQ ID NO: 29239

SEQ ID NO: 29241 - protein, 103 aa, Homo sapiens; identical to SEQ ID NO: 29239

SEQ ID NO: 29242 - protein, 103 aa, Homo sapiens
AASGFIFSGYGMHWVRQAPGKGPEWVAVIWSDGSNEFYGDFVKGRLTISRDNSQNTLFLQMNSLRVEDTGVYYCARDGNYFDTAGYSYYFDLWGQGTRVTVSS

SEQ ID NO: 29243 - protein, 95 aa, Homo sapiens
AASGFTFSSYSMHWVRQAPGKGLVWVSRINTDGSTTTYADSVKGRFTISRDNAKNTLYLQMNSLRAEDTAVYYCARNRNYYFDYWGQGALVTVSS

SEQ ID NO: 29244 - protein, 95 aa, Homo sapiens
AASGFTFSSYSMHWVRQAPGKGLVWVSRINTDGSTTTYADSVKGRFTISRDNAKNALYLQMNSLRAEDTAVYYCARNRNYYFDYWGQGALVTVSS

SEQ ID NO: 29245 - protein, 94 aa, Homo sapiens
ASGYMFSSYDINWVRQAPGQGLEWMGWMNPFSGDTGYAQKFQGRVTMTRNPSINTAYMDLSSLTFEDTALYFCARGHGGASDYWGQGTLVTVSS

SEQ ID NO: 29246 - protein, 93 aa, Homo sapiens
SGYMFSSYDINWVRQAPGQGLEWMGWMNPFSGDTGYAQKFQGRVTMTRNPSINTAYMDLSSLTFEDTALYFCARGHGGASDYWGQGTLVTVSS

SEQ ID NO: 29247 - protein, 96 aa, Homo sapiens
GASGVTFSSCGMHWVRQAPGKGLEWVSFISFDGNKKNYADSVKGRFTISRDNSKNTLYLQMNSLRAEDTAVYYCAKTSGYFYPDYWGQGTLVTVSS

SEQ ID NO: 29248 - protein, 96 aa, Homo sapiens
AASGFTFSSCGMHWVRQAPGKGLEWVAVISFDGSNKYYADSVKGRFTISRDNSKHTLYLQMNSLRAEDTAVYYCAKTSGYFYPDYWGQGTLVTVSS

SEQ ID NO: 29249 - protein, 96 aa, Homo sapiens
AASGFTFSSCGMHWVRQAPGKGLEWVAVISFNGINKYYADSVKGRFTISRDNSKNTLNLQMNSLRAEDTAVYYCAKTSGYFYPDYWGQGTLVTVSS

SEQ ID NO: 29250 - protein, 104 aa, Homo sapiens
AVSGGSISSNNWWSWVRQPPGKGLEWIGEIYHTGSTNYNPSLKSRVTISVDKSKNQFSLKLSSVTAADTAVYYCARGGNGYYDRSGYSYPFDYWGQGTLVTVSS

SEQ ID NO: 29251 - protein, 104 aa, Homo sapiens
AVSGGSISSNNWWSWVRQPPGKGLEWIGEIYHTGSTNYNPSLKSRITISVDNSKNQFSLKLTSVTAADTAVYYCARGGNGYYDRSGYSYPFDYWGQGTLVTVSS

SEQ ID NO: 29252 - protein, 97 aa, Homo sapiens
AASGFTFSSFAMSWVRQAPGKGLEWVALITSGGGTTYYADSVRGRFTISRDNSKNTLYLQMNSLRVEDTAVYFCAKEMDSPGYYMNVWGKGTTVTVS

SEQ ID NO: 29253 - protein, 98 aa, Homo sapiens
AASGFTFSSFAMSWVRQAPGKGLEWVSLISRGGGTTYYADSVKGRFTVSRDDSKSTLYLQMSSLRVEDTAVYYCAKEMDSPGYYMNVWGKGTTVTVSS

SEQ ID NO: 29254 - protein, 98 aa, Homo sapiens
AASGFTFSSFAMSWVRQAPGKGLEWVSLITSGGGNTHYADSVRGRFTVSRDNSNNTMYLQLNSLRVEDTAVYYCAKEMDSPGYYMNVWGKGTTVTVSS

SEQ ID NO: 29255 - protein, 98 aa, Homo sapiens
VGSGFTFSSFAMSWVRQVPGKGLEWVSGINSGGGRTSYVDSVKGRFTISRDNSKNTLYLQMNNLRAEDTALYYCAKEMDSPGYYMNVWGNGTTVTVSS

SEQ ID NO: 29256 - protein, 96 aa, Homo sapiens
EASGFTFSTYWMSWVRQAPVKGLEWVANIKEDGSEIYYLDSVKGRFTISRDNGKSSLSLQMNSLRAEDTAVYYCVSMVWGGAFDAWGQGTLVTVSS

SEQ ID NO: 29257 - protein, 95 aa, Homo sapiens
EASGFTFSTYWMSWVRQAPVKGLEWVANIKEDGSDIYYLDSVKGRFTISRDNGKSSLSLQMNSLRAEDTAIYYCVSMVWGGAFDAWGQGTLVTVS

SEQ ID NO: 29258 - protein, 95 aa, Homo sapiens
EASGFTFSTYWMSWVRQAPVKGLEWVANIKEDGSEIYYLDSVKGRFTISRDNGKSSLSLQMNSLRAEDTAVYYCVSMVWGGAFDAWGQGTLVTVS

SEQ ID NO: 29259 - protein, 95 aa, Homo sapiens
EGSGFSFSTYWMSWVRQAPVKGLEWVANIKEDGSEIYYLDSVKGRFTISRDNGKSSLSLQMNSLRAEDTAVYYCVSMVWGGAFDAWGQGTLVTVS

SEQ ID NO: 29260 - protein, 101 aa, Homo sapiens
AASGFTFSDYGMHWVRQAPGKGLEWVTVVSYDGRNKYYADSVKGRFTISRDNSTNTLYLQMNSLRAEDTAVYYCAKDAASGTYHYGYFDYWGQGTLVTVSS

SEQ ID NO: 29261 - protein, 101 aa, Homo sapiens
AASGFTFSNYGMHWVRQAPGKGLEWVTVVSYDGSNKYYADSVKGRFTISRDNSTNTLYLQMNSLRAEDTAVYYCAKDAASGTYHYGYFDYWGQGTLVTVSS

SEQ ID NO: 29262 - protein, 101 aa, Homo sapiens; identical to SEQ ID NO: 29261

SEQ ID NO: 29263 - protein, 101 aa, Homo sapiens
AASGFTFSNYGMHWVRQAPGKGLEWVTVVSYDGRNKYYADSVKGRFTISRDNSTNTLYLQMNSLRAEDTAVYYCAKDAASGTYHYGYFDYWGQGTLVTVSS

SEQ ID NO: 29264 - protein, 100 aa, Homo sapiens
AASGFTFSDYSMHWVRQAPGKGLEWVSSIDSTSRYIYYADSLKGRFTISRDNAKNSLYLQMSGLGAEDTALYYCVRDPHLYSSYYYFDYWGQGTLVTVSS

SEQ ID NO: 29265 - protein, 100 aa, Homo sapiens
AASGFTFSDYSMHWVRQAPGKGLEWVSSIDSSSRYIYYADSFKGRFTISRDNARSSLWLQMSGLGAEDTALYYCVRDPHLYSSYYYFDYWSQGTLVTVSS

SEQ ID NO: 29266 - protein, 101 aa, Homo sapiens
AASGFTFNNYVMSWVRQAPGKGLEWVSAISGSGDSTYYADSVKGRFTISRDNSRNTLYLQMNSLRDEDTALYYCAKDKIRQIIVVGHNDFWGQGTMVTVSS

SEQ ID NO: 29267 - protein, 101 aa, Homo sapiens
AASGFTFNNYAMSWVRQAPGKGLEWVSAISGSGDSTYYADSVKGRFTISRDNSRNTLYLQMNSLRDEDTALYYCAKDKIRQIIVVGHNDFWGQGTMVTVSS

SEQ ID NO: 29268 - protein, 101 aa, Homo sapiens
AASGFTFNNYAMSWVRQAPGKGLEWVSAISGSGDKIYYADSVKGRFTISRDNSKNTLYLQMNSLRDEDTALYYCAKDKIRQIIVVGHNDFWGQGTMVTVSS

SEQ ID NO: 29269 - protein, 101 aa, Homo sapiens
AASGFTFNNYAMSWVRQAPGKGLEWVSAISGSGDSTYYADSVKGRFTISRDNSKNTLYLQMNSLRDEDTALYYCAKDKIRQIIVVGHNDFWGQGTMVTVSS

SEQ ID NO: 29270 - protein, 95 aa, Homo sapiens
AVYGESLSGYYWTWVRQPPGKGLQWIGEVNHSGSTNFNPSLKSRVTISVDTSKNQFSLKLTSVTAADTAVYYCARLHRNYALDSWGQGTPVTVSS

SEQ ID NO: 29271 - protein, 95 aa, Homo sapiens; identical to SEQ ID NO: 29270

SEQ ID NO: 29272 - protein, 95 aa, Homo sapiens
AVYGESLSGYYWTWVRQPPGKGLQWIGEVNHSGSTNFNPSLKSRLTISVDTSKNQFSLKLTSVTAADTSVYYCARLHRNYALDSWGQGTPVSVSS

SEQ ID NO: 29273 - protein, 95 aa, Homo sapiens
AVYGESLSGYYWTWVRQPPGKGLQWIGEVNHSGSTNFNPSLKSRVTISVDTSKKQFSLKLASVTAADTAVYYCARLHRNYALDSWGQGTPVTVSS

SEQ ID NO: 29274 - protein, 93 aa, Homo sapiens
AASGFSFSTYALSWVRQAPGKGLEWVSTIGGGGVSTYYADSVKGRFTISRDNSKNTLYLQMNSLRGEDTAVYYCAKDSTPNYWGQGTLVTVSS

SEQ ID NO: 29275 - protein, 93 aa, Homo sapiens
VTSGFTFSNSPMSWVRQAPGKGLEWVSAISGSGTTTYYADSVKGRFTISRDISKSTLYLQMNSLRAADTAVYYCAKDSTPNYCGPGTLVTVSS

SEQ ID NO: 29276 - protein, 98 aa, Homo sapiens
VASGFTFSAKWMHWVRQVPGQGLVWISRINGDGGLTAYAGSVKGRFTISRDNAKNTLYLQMNSLRAEDTAVYFCVRGPNDKSGGFDSWGQGTQVTVSS

SEQ ID NO: 29277 - protein, 98 aa, Homo sapiens
AASGFIFRAKWMHWVRQVPGQGLMWIARINGDGGVTAYAESVKGRFSISRDNAKNTLYLQMNSLRGEDTAVYFCVRGPNDKSGGFDSWGQGIQVTVSS

SEQ ID NO: 29278 - protein, 102 aa, Homo sapiens
VASGFTFRNYAMNWVRQAPGKGLEWVASISYSGESTYYADSVKDRFALSRDNSKNTLYLQMDSLRGEDTAVYFCAKGWSGNSGPYYYTMDVWGKGTTVTVSS

SEQ ID NO: 29279 - protein, 102 aa, Homo sapiens
VASGFTFRNYAMNWVRQAPGKGLEWVASISYSGETTYYADSVKDRFTLSRDNSKNTLYLQMDSLRGEDTAVYFCAKGWSGNSGPYYYTMDVWGKGTTVTVSS

SEQ ID NO: 29280 - protein, 99 aa, Homo sapiens
TVSGGSISNTSYYWGWVRQSPGKGLQWVGSVFYSGGTYYNPSLKSRVTIVADTSNNQFSLNLTSVTAADAALYYCARHSSLYHAPFDPWGHGTLVTVSS

SEQ ID NO: 29281 - protein, 99 aa, Homo sapiens
TVSGGSISNTSYYWGWVRQSPGKGLQWVGSVFYSGDTYYNPSLKSRVSVVTDTSNNQFSLNLTSVTAADAALYYCARHSSLYHAPFDPWGPGILVTVSS

SEQ ID NO: 29282 - protein, 97 aa, Homo sapiens
AASGFTFSSNPMGWVRQAPGKGLEWVSVMGGSDGSTYYADSVRGRFTISRDNSKNTLYLQMHSLRAEDTAVYYCAKRHMVFGVVDYWGQGTLVTVSS

SEQ ID NO: 29283 - protein, 97 aa, Homo sapiens
AASGFTFSSNPMGWVRQAPGKGLEWVSVMGGSDGSTYYADSVRGRFTISRDNSKNTLYLQVYSLRAEDTAVYYCAKRHMVFGVVDYWGQGTLVTVSS

SEQ ID NO: 29284 - protein, 95 aa, Homo sapiens
AASGFSFSSYWMSWVRQSPGKGLEWVASIAQDGGEKHYVDSVKGRFTISKDNAKNSLYLQMNSLRVEDTAVYYCARESHARFDYWGQGTRVTVSS

SEQ ID NO: 29285 - protein, 95 aa, Homo sapiens
AASGFIFSSYWMSWVRQPPGKGPEWVANIKQDGGEKYYVDSVKGRFTISKDNAKNSLYLQMNSLRAEDTAVYYCARESHARFDYWGQGTRVTVSS

SEQ ID NO: 29286 - protein, 102 aa, Homo sapiens
AASGFTFSSYEMNWVRQAPGKGLEWVSYISSSSGTVYYADSVRGRFTISRDNAKNSLYLQMNSLRAEDTAVYFCARGGAYCSKGVCYIFDYWGQGTLVTVSS

SEQ ID NO: 29287 - protein, 102 aa, Homo sapiens; identical to SEQ ID NO: 29286

SEQ ID NO: 29288 - protein, 97 aa, Homo sapiens
VAGYTLPELSIYWVRQAPGKGLEWMGGFDREDGETIYAQNFQGRVTMTEDTSTDTAYMELSSLRSEDTAIYYCARKEELRVLGLDLWGQGTMVTVSS

SEQ ID NO: 29289 - protein, 97 aa, Homo sapiens
VAGYTLPELSIYWVRQAPGKGLEWMGGFDRETGETIYAQNFQGRVTMTEDTSTDTAYMELSSLRSEDTAIYYCARKEELRVLGLDLWGQGTMVTVSS

SEQ ID NO: 29290 - protein, 97 aa, Homo sapiens
VVGYTLPELSIYWVRQAPGKGLEWMGGFDRGEGETIYAQNFQGRVTMTEDTSTDTAYMELSSLRSEDTAMYYCARKEELRVLGLDLWGQGTMVTVSS

SEQ ID NO: 29291 - protein, 97 aa, Homo sapiens
VAGYTLPELSIYWVRQAPGKGLEWMGGFDREDGETIYAQNFQGRVTMTEDRSTDTAYMELSSLRSEDTAIYYCARKEELRVLGLDLWGQGTMVTVSS

SEQ ID NO: 29292 - protein, 95 aa, Homo sapiens
GFSFSTYGMHWVRQAPGKGLDWVAFISYRGTKKYSEDSVRGRFTISRDNSKNTLYLQMNSLRAEDTALYYCANQPRDTDNILWDWGQGTLVTVSS

SEQ ID NO: 29293 - protein, 98 aa, Homo sapiens
AASGFSFSTYGMHWVRQAPGKGLDWVAFISYTGTTKYNADSVKGRFTISRDNSKNTLFLQMNSLRAEDTALYYCANQPRDTDNILWDWGQGTLVTVSS

SEQ ID NO: 29294 - protein, 102 aa, Homo sapiens
AASGFMFSSFYMSWVRQAPGKGLEWVANIKEDGSEKQYVDSVRGRFTISRDNDKNSLSLQMNSLRGDDTAVYYCARVARVGDLSLYRPLDYWGQGTLVTVSS

SEQ ID NO: 29295 - protein, 102 aa, Homo sapiens
AASGFTFSSFYMSWVRQAPGKGLEWVANIKEDGSEKQYVDSVRGRFTISRDNDKNSLSLQMNSLRGDDTAVYYCARVARVGDLSLYRPLDYWGQGTLVTVSS

SEQ ID NO: 29296 - protein, 91 aa, Homo sapiens
AASGFTFSDYDMNWVRQAPGKGLEWVSYVSPTSRTIYYADSVKGRFTISRDNAKNSLFLQMNSLRDEDTAVYYCARGHTVWGQGTLVTVSS

SEQ ID NO: 29297 - protein, 91 aa, Homo sapiens
AASGFTFTNYDMNWVRQAPGKGLEWISFISPTSKTIYYADSVKGRFTISRDNAKNSIFLQMNSLRDEDTAVYYCARGHTVWGQGTLVTVSS

SEQ ID NO: 29298 - protein, 102 aa, Homo sapiens
AASRFIFSDHYMDWVRQAPGKGLEWVARARNKARSYTTEYAASVKGRFTISRDESKNSLYLQMNSLNTEDTAVYYCVRGYSDSRAYVFSGYWGQGILVTVSS

SEQ ID NO: 29299 - protein, 102 aa, Homo sapiens
AASGFIFSDHYMDWVRQAPGKGLEWVARARNKARSYTTEYAASVKGRFTISRDESKNSLYLQMNSLNTEDTAVYYCVRGYSDSRAYVFSGYWGQGILVTVSS

SEQ ID NO: 29300 - protein, 102 aa, Homo sapiens
AASGFSFITYGMHWVRDVPGKGLEWVAAISFDGSHQYYAESVRGRFTISRDDPRNSLYLHMNGLRPEDTAVYYCAQDDHSKERNEYLYFDYWGRGTLVTVSS

SEQ ID NO: 29301 - protein, 102 aa, Homo sapiens
AASGFSFITYGMHWVRQAPGKGLEWVAAISFDATHQYYAESVKGRFTISRDNSKNSLYLQMNSLRPEDTAVYYCAQDDHSKERNEYLYFDYWGRGTLVTVSS

SEQ ID NO: 29302 - protein, 102 aa, Homo sapiens
AASGFTFITYGMHWVRQAPGKGLEWVAAISFDGSHEYYAESVKGRFTISRDNSKNSLYLQMNSLRPEDTAVYYCAQDDHSKERNEYLYFDYWGRGTLVTVSS

SEQ ID NO: 29303 - protein, 97 aa, Homo sapiens
KGVGYRFPSHWIGWVRQMPGKGLEWMGVIYPGDSDTRYSPSFQGQVTISADKSISTAYLQWSSLKASDTAMYYCARHSPYSGSSDSWGQGTLVTVSS

SEQ ID NO: 29304 - protein, 97 aa, Homo sapiens
KGAGYRFSSHWIGWVRQMPGKGLEWMGVIYPGDSDTRYSPSFQGQVTISADKSISTAYLQWSSLKASDTAMYYCARHSPYSGSSDSWGQGTLVTVSS

SEQ ID NO: 29305 - protein, 98 aa, Homo sapiens
ASGFAVSSNYMSWVRQAPGKTLEWVSVTYTGGSTYYADSVKGRFTISRDIPNNTLYLQMNSLRAEDTAVYYCARNLNTAPGVGWFDPWGQGTLVTVSS

SEQ ID NO: 29306 - protein, 99 aa, Homo sapiens
AASGFTVSSSYMSWVRQAPGKTLEWVSVIYTGGSTYYADSVKGRFTISRDISNNTLYLQMNSLRAEDTAVYYCARNLNTAPGVGWFDPWGQGTLVIVSS

SEQ ID NO: 29307 - protein, 98 aa, Homo sapiens
AASGFTFSSYGMHWVRQAPGKGLEWVAAIWSDGSKKYYADSVKGRFTISRDKSNNTLYLQLNSLRADDMAVYYCAKDRGFGVTQIDFWAQGTLVTVSS

SEQ ID NO: 29308 - protein, 98 aa, Homo sapiens
AASGFTFSSYGMHWVRQAPGKGLEWVAAIWSDGSKKYYADSVKGRFTISRDKSNNTLYLQLNSLRAEDMAVYYCAKDRGFGVTQIDFWAQGTLVTVSS

SEQ ID NO: 29309 - protein, 98 aa, Homo sapiens
AASGFTFSSYGMHWVRQAPGKGLEWVAGIWSDGSKKYYADSVKGRFTISRDKSNNTLYLQLNSLRAEDVAVYYCAKDRGFGVTQIDFWAQGTLVTVSS

SEQ ID NO: 29310 - protein, 98 aa, Homo sapiens; identical to SEQ ID NO: 29308

SEQ ID NO: 29311 - protein, 104 aa, Homo sapiens
AASGFIFSSYGMHWVRQAPGKGLEWVAVIWSDESNKYYLDSVKGRFTISRDKSKNTLYLQMNSLRAEDTAVYYCARDVHYCSGGSCHSVGWDYWGQGTLVTVSS

SEQ ID NO: 29312 - protein, 104 aa, Homo sapiens
AASGFIFSSYGMHWVRQAPGKGLEWVAVIWSDESQKYYLDSVKGRFTISRDKSKKTLYLQMNSLRAEDTAVYYCARDVHYCSGGSCHSVGWDYWGQGTLVTVSS

SEQ ID NO: 29313 - protein, 96 aa, Homo sapiens
SGYPFRSYAMHWVRQAPGQRLEWMGWVNVGMSEPTFSQKFQGRLNITKDTAASTVYMELSRLTSEDTAIYYCARERTYGGRLLDYWGQGTLVTVSS

SEQ ID NO: 29314 - protein, 96 aa, Homo sapiens
SGYTFRSYAMHWVRQAPGQRLEWLGWINVGLSEPRFSQKFQGRVNITKDTTATTVYMELSSLSSEDTAMYYCARERTYGGRLLDYWGQGTLVTVSS

SEQ ID NO: 29315 - protein, 105 aa, Homo sapiens
AASGFSFSNYNINWVRQAPGKGLEWVSYISSSSSIIYYADSVEGRFTISRDNAKNSLYLQMNSLRDEDTAVYYCARGGRASGSYFQRHEDAFDIWGQGTMVTVSS

SEQ ID NO: 29316 - protein, 105 aa, Homo sapiens
AASGFIFSNYNINWVRQAPGKGLEWVSYISSSSSIIYYADSVEGRFTISRDNAKNSLYLQMNSLRDEDTAVYYCARGGRASGSYFQRHEDAFDIWGQGTMVTVSS

SEQ ID NO: 29317 - protein, 105 aa, Homo sapiens
AASGFTFSSYSMNWVRQAPGKGLEWVSYISSSNSTIYYADSVKGRFTLSRDNAKNSLYLQMNSLRDEDTAVYYCARGGRASGSYFQRHEDAFDIWGQGTMVTVSS

SEQ ID NO: 29318 - protein, 105 aa, Homo sapiens; identical to SEQ ID NO: 29317

SEQ ID NO: 29319 - protein, 97 aa, Homo sapiens
SGYTFTDHSIHWVRQAPGQRLEWMGWIIGNRDGTKYSQKFQGRVTMTKDTFASTVYMELSSLRSEDTAVYYCAREGAPYYHYYVDVWGKGTTVTVAS

SEQ ID NO: 29320 - protein, 97 aa, Homo sapiens; identical to SEQ ID NO: 29319

SEQ ID NO: 29321 - protein, 97 aa, Homo sapiens
SGYTFTDHSIHWVRQAPGQRLEWMGWIIGNRDGTKYSQKFQGRVTMTKDSFASTVYMELSSLTSEDTAVYYCAREGAPYYHYYVDVWGKGTTVTVAS

SEQ ID NO: 29322 - protein, 99 aa, Homo sapiens
AASGFTFSRHWMSWVRQAPGKGLEWVANIKNDGSEKYYVDSVKGRFTISRDNAKNSVYLQMNSLRAEDTAVYYCARDGIQVRMEAFDIWGQGTMVTVSS

SEQ ID NO: 29323 - protein, 99 aa, Homo sapiens; identical to SEQ ID NO: 29322

SEQ ID NO: 29324 - protein, 99 aa, Homo sapiens
AASGFTFSRHWMSWVRQAPGKGLEWVANIKNDGSEKYYVDSVKGRFTISRDNAKNSVYMQMNSLRAEDTAVYYCARDGIQVRMEAFDIWGQGTMVTVSS

SEQ ID NO: 29325 - protein, 101 aa, Homo sapiens
KGSGYSFTSYWVGWVRQMPGKGLEWMGIIYPGDSDTRYSPSFQGQVTLSVDKSISTAYLQWSSLKASDTAMYYCARHGATYAAVGTSFDYWGQGTLVTVSS

SEQ ID NO: 29326 - protein, 101 aa, Homo sapiens
KGSGYSFTSYWIGWVRHMPGKGLEWMGIIYPGDSDTRYSPSFQGQVILSVDKSINIAYLQWSSLKASDTAMYYCARHGATYAAVGTSFDYWGQGTLVTVSS

SEQ ID NO: 29327 - protein, 92 aa, Homo sapiens
AASGFIFSNDAMNWVRQAPGKGLEWVASINQDGSIKYYVDSVKGRFAISRDNARDSLYLQMNSLGAEDTAVYYCASDWFVYWGQGALVTVSS

SEQ ID NO: 29328 - protein, 92 aa, Homo sapiens
AASGFIFSSDAMNWVRQAPGKGLEWVASINQDGSIKYYVDSVKGRFAISRDNARDSLYLQMNSLGAEDTAVYYCASDWFVYWGQGTLVTVSS

SEQ ID NO: 29329 - protein, 102 aa, Homo sapiens
AASGFTFTDYGLHWVRQAPGKGLEWVASVSSEGGRTFYPFYLGGRFTVYRVNVKNTLYLQINSPTTEDTAVYYCARDGRANYYGPPANWFDPWGQGTQVTVS

SEQ ID NO: 29330 - protein, 102 aa, Homo sapiens
AASGFTFTDYGLHWVRQAPGKGLEWVASVSSEGGRTLYPFYLGGRFTVYRVNVQNTLYLQINSPTTEDTAVYYCARDGRANYYGPPANWFDPWGQGTQVTVS

SEQ ID NO: 29331 - protein, 102 aa, Homo sapiens; identical to SEQ ID NO: 29329

SEQ ID NO: 29332 - protein, 97 aa, Homo sapiens
AASGFTFSNYGMHWVRQAPGKGLEWVAVIWYDGSNKYYADSVKGRFTISRDNSKNTLYLQMNSLRVEDTAVYYCAREPAGTISFDYWGQGTLVTVSS

SEQ ID NO: 29333 - protein, 97 aa, Homo sapiens
AASGFTFSNYGMHWVRQAPGKGLEWVAVIWYDGSNEYYADSVKGRFTISRDNSKNTLYLQMNSLRGEDTAVYYCAREPAGTISFDYWGQGTLVTVSS

SEQ ID NO: 29334 - protein, 97 aa, Homo sapiens
AASGFTFSNYGMHWVRQAPGKGLEWVAIIWYDGSNKYYADSVKGRFTISRDNSKNTLYLQMNSLRAEDTAVYYCAREPAGTISFDYWGQGTLVTVSS

SEQ ID NO: 29335 - protein, 97 aa, Homo sapiens
AASGFTFSNYGMHWVRQAPGKGLEWVAVIWYDGSNEYYADSVKGRFTISRDNSNNTLYLQMNSLRAEDTAVYYCAREPAGTISFDYWGQGTLVTVSS

SEQ ID NO: 29336 - protein, 97 aa, Homo sapiens
AASGFTFSNYGMHWVRQAPGKGLEWVAVIWYDGSNKYYADSVKGRFTISRDNSKSTLYLQINSLRAEDTAVYYCAREPAGTISFDYWGQGTLVTVSS

SEQ ID NO: 29337 - protein, 97 aa, Homo sapiens
AASGFTFSNYGMHWVRQAPGKGLEWVAVIWYDGSNEYYADSVKGRFTISRDNSKNTLYLQMNSLTAEDTAVYYCAREPAGTISFDYWGQGTLVTVSS

SEQ ID NO: 29338 - protein, 97 aa, Homo sapiens
AASGFTFSNYGMHWVRQAPGKGLEWVAVIWYDGSNEHYADSVKGRFTISRDNSKNTLYLQMNSLTAEDTAVYYCAREPAGTISFDYWGQGTLVTVSS

SEQ ID NO: 29339 - protein, 97 aa, Homo sapiens
AASGFTFSSYAMHWVRQPPGKGLEWVAAIWYDGSQQFYADSVKGRFAISRDTSKNTLYLQMNSLTAEDTAVYYCAREPAGTISFDYWGQGTLVTVSS

SEQ ID NO: 29340 - protein, 113 aa, Homo sapiens
TQTLTLTCTFSGFSLSTSGVGVGWIRQPPGKALEWLAVIYWDGDKWYSPSLKSRLTNTKDTSKNQVVLTMTNMDPVDTATYYCAHTGGYTYGSRFYYYYMDVWGKGTTVTVSS

SEQ ID NO: 29341 - protein, 113 aa, Homo sapiens
TQTLMLTCTFSGFSLSTSGVGVGWIRQPPGKALEWLAVIYWDADKWYSPSLKSRLTNTKDTSKNQVVLTMTNMDPVDTATYYCAHTGGYTYGSRFYYYYMDVWGKGTTVTVSS

SEQ ID NO: 29342 - protein, 99 aa, Homo sapiens
ASGGTFNNYAITWVRQAPGQGLEWVGGISPVFGKANYAQKFQGRVTITAGDSTSTAYMELRSLRSEDTAVYYCARGIYGDYVGGAFDIWGQGTMVTVSS

SEQ ID NO: 29343 - protein, 99 aa, Homo sapiens
ASGGSFNNYAIGWVRQPPGQGLQWMGGISPVFATGKYAQKFQGRVTITADESTSTAYMEVRSLRYEDTAVYYCARGIYGDYVGGAFDIWGQGTMVSVSS

SEQ ID NO: 29344 - protein, 100 aa, Homo sapiens
PSGFTFGSYAMTWVRQAPGTGLEWVSTILSSGGSTYYADSVKGRFTISRDNSKNTLYLQMNSLRGEDTAVYYCARHCTITDCGARWFDPWGQGTLVTVSS

SEQ ID NO: 29345 - protein, 101 aa, Homo sapiens
AASGFTFGSYAMTWVRQAPGTGLEWVSTILSSGGSTFYADSVRGRFSISRDNSRNTLYLQMYSLRGEDTAIYYCARHCTITDCGARWFDPWGQGTLVTVSS

SEQ ID NO: 29346 - protein, 100 aa, Homo sapiens
PSGFTFGSYAMTWVRQAPGTGLEWVATILSSGSGTYYADSMRGRFTISRDNSKSTLYLQINSLRAEDTAIYYCARHCTITDCGARWFDPWGQGTLVTVSS

SEQ ID NO: 29347 - protein, 105 aa, Homo sapiens
TQTLTLTCNFSGFSLSTPGMGVAWIRQPPRKALEWIAVIYWDDDKLYSPSLKNKLTISKDTSKNQVVLTMTNMDPLDTATYYCAHRRGYDPFGYWGQGTQVTVSS

SEQ ID NO: 29348 - protein, 105 aa, Homo sapiens
TQTLTLTCNFSGFSLTTAGMGVAWIRQPPRKALEWIAVIYWDDDKLYSPSLKNKLTISKDTSKNQVVLTMTNMDPLDTATYYCAHRRGYDPFGYWGQGTQVTVSS

SEQ ID NO: 29349 - protein, 96 aa, Homo sapiens
GSGYSFTRYWIAWVRQMPGKGLEWMGIISPGDSGATYSPSFQGRVTFSADRSINTAYLQWRSLKASDSGIYYCARLLTATSPLTYWGQGTLITVSS

SEQ ID NO: 29350 - protein, 97 aa, Homo sapiens
KGYGYSFTRYWIAWVRQMPGKGLEWLGIISPADSDARYSPSFQGQVTISADKSIGTAYLQWNSLQASDSAIYFCARLLTATSPLTYWGQGTLVTVSS

SEQ ID NO: 29351 - protein, 100 aa, Homo sapiens
AVSGFTFSSYSMNWVRQAPGKGLEWVSSISSSSTYIYYADSVKGRFTISRDNAKNSLYLQMNSLRAEDTAVYYCARPAAGGITGTHVDYWGQGTLVTVSS

SEQ ID NO: 29352 - protein, 100 aa, Homo sapiens
AVSGFTFSSYSMNWVRQAPGKGLEWVSSISSSSSYIYYADSVKGRFTISRDNAKNSLYLQMNSLRAEDTAIYYCARPAAGGITGTHVDYWGQGTLVTVSS

SEQ ID NO: 29353 - protein, 100 aa, Homo sapiens; identical to SEQ ID NO: 29351

SEQ ID NO: 29354 - protein, 100 aa, Homo sapiens
AASGFTFSSYSMNWVRQAPGKGLEWVSSISGSSSYIYYADSVRGRFTISRDNAKNSLYLQMNSLRAEDTAVYYCARPAAGGITGTHVDYWGQGTLVTVSS

SEQ ID NO: 29355 - protein, 99 aa, Homo sapiens
AVSGGSISSNTWWSWVRQSPGEGLIWIGEIHHSGSVNYNPSLKSRVTMSVDKSKNQFSLKLTSVTAADTAVYYCAREGQVGATKYFRHWGPGTLVTVSS

SEQ ID NO: 29356 - protein, 99 aa, Homo sapiens; identical to SEQ ID NO: 29355

SEQ ID NO: 29357 - protein, 99 aa, Homo sapiens
AVSGGSISSNTWWSWVRQSPGEGLIWIGEIHHSGSVNYNPSLKSRVTMSVDKSKNQFSLKLTSVTAADTAVYYCAREGQVGATKYFRHWGPGTLFTVSS

SEQ ID NO: 29358 - protein, 92 aa, Homo sapiens
AASGFTFNTYWMTWVRQAPGKGLEWLASIKGDGSKKFYEDSMKGRFTISRDNAKNSLFLEMNSLRAEDTAIYFCGNVQHDYWGQGTLVTVSS

SEQ ID NO: 29359 - protein, 92 aa, Homo sapiens
GASGFTFNSYWMTWVRQAPGKGLEWLASIKEDGSKKFYVDSMKGRLTISRDNAKNSLFLEMNSLRAEDTAIYFCGNVQHDYWGQGTLVTVSS

SEQ ID NO: 29360 - protein, 92 aa, Homo sapiens
AASGFTFNTYWMTWVRQAPGKGLEWLASIKEDGSKRFYVDSMKGRLTISRDNAKNSLFLEMNSLRAEDTAIYFCGNVQHDYWGQGTLVTVSS

SEQ ID NO: 29361 - protein, 95 aa, Homo sapiens
AASGFTFSNNDMHWVRQVTGQGLEWVSAIGTASDTYYAGSVKGRFIISRENAKNSLYLQMSSLRDEDTAVYYCARGKPGLWFDFWGQGILVTVSS

SEQ ID NO: 29362 - protein, 95 aa, Homo sapiens; identical to SEQ ID NO: 29361

SEQ ID NO: 29363 - protein, 114 aa, Homo sapiens
AASGFSFDDYVIHWVRQAPGKGLEWVSLISGDGGTTYYAESVKGRFTISRDNSKDSLYLEMNSLRTEDSALYYCAKDGFSRDLWSGYWMGGADFYYYYSYMDVWGKGTTVTVSS

SEQ ID NO: 29364 - protein, 114 aa, Homo sapiens
AASGFTFDDYVINWVRQAPGKGLEWVSLISGDGGTTYYAESVKGRFTISRDNSKDSLYLEMNSLRTEDSALYYCAKDGFSRDLWSGYWMGGADFYYYYSYMDVWGKGTTVTVSS

SEQ ID NO: 29365 - protein, 114 aa, Homo sapiens; identical to SEQ ID NO: 29364

SEQ ID NO: 29366 - protein, 114 aa, Homo sapiens; identical to SEQ ID NO: 29364

SEQ ID NO: 29367 - protein, 96 aa, Homo sapiens
AASGLTFSSSDMTWVRQAPGMGLEWVSAISGSGGTTYYADSVKGRFTISRDNSKNTLYLQMNTLRAEDTALYYCAKTEGVGMTDYWGQGTLVTVSS

SEQ ID NO: 29368 - protein, 96 aa, Homo sapiens
AASGLTFSSSDMTWVRQAPGMGLEWVSAISGSGGTTYYADSVKGRFTISRDNSKNTLYLQMNTLRAEDTAVYYCAKTEGVGMTDYWGQGTLVTVSS

SEQ ID NO: 29369 - protein, 94 aa, Homo sapiens
AASGFTLSNYWVTWVRQAPGKGLEWVANIRHNGSLKYYVDSVKGRFTISRDNAENLVYLQMNSLRVEDTAIYYCATRQDCGGYWGPGTLVTVSS

SEQ ID NO: 29370 - protein, 94 aa, Homo sapiens
AASGFTLSDYWVTWVRQAPGKGLEWVANIRHNGSLKFYVDSVKGRFTISRDNTENLVYLQMNSLGVEDTAIYYCATRQDCGGYWGPGTLVTVSS

SEQ ID NO: 29371 - protein, 91 aa, Homo sapiens
ASGFIFSGDAMNWVRQAPGKGLEWVASINQDGSIKYYVDSVKGRFTISRDNARDSLYLQMNSLGAEDTAVYYCTSDWFVYWGQGTLVTVSS

SEQ ID NO: 29372 - protein, 92 aa, Homo sapiens
AASGFIFSGDAMNWVRQAPGKGLEWVASINQDGSVKYYVDSVKGRFTISRDNARDSLHLQMNSLGAEDTAVYYCTSDWFVYWGQGTLVTVSS

SEQ ID NO: 29373 - protein, 92 aa, Homo sapiens
VASGFIFSSDAMNWVRQAPGKGLEWVASINQDGSVKYYVDSVKGRFTISRDNARDSLYLQMNSLGAEDTAVYYCTSDWFVYWGQGTLVTVSS

SEQ ID NO: 29374 - protein, 98 aa, Homo sapiens
AASGFTVSNNYMTWVRQAPGKGLEWVSVIYSGGTTYYSDSLKGRFTISRDNSKNTLYLQMNSLRAEDTAVYYCASSGDNYNYYGFDSWGQGTLVTVSS

SEQ ID NO: 29375 - protein, 98 aa, Homo sapiens
AASGFTVSNNYMTWVRQAPGKGLEWVSVIYSGGTTYYSDSLKGRFTISRDYSKNTLYLQMNTLRAEDTAVYYCASSGDNYNYYGFDSWGQGTLVTVSS

SEQ ID NO: 29376 - protein, 95 aa, Homo sapiens
ASGNTFTSNYMHWVRQAPGQGLEWMGIINPTGDTTSYAQNFQDRVTMTRDTSLSTVYMELSSLRSEDTAMYYCAGATIAAPIDYWGPGTLVTVSS

SEQ ID NO: 29377 - protein, 95 aa, Homo sapiens; identical to SEQ ID NO: 29376

SEQ ID NO: 29378 - protein, 95 aa, Homo sapiens
ASGNTFTSNYMHWVRQAPGQGLEWMGIINPTGDTTSYAQNFQDRVTMTRDTSLSTVYMELSSLRSEDTAIYYCAGATIAAPIDYWGPGTLVTVSS

SEQ ID NO: 29379 - protein, 105 aa, Homo sapiens
TVSGGSITSSTYYWAWIRQPPGKGLEWIGSLYHSGSTYYNPSLKSRVTISVDTSKSQFSLQVTSVTAADTAVYFCASKMKSAYDITGYSEAFDIWGQGTVVTVSS

SEQ ID NO: 29380 - protein, 105 aa, Homo sapiens
TVSGGSITSSTYYWGWIRQPPGKGLEWIGSIYYSGSTYYNPSLKSRVTISVDTSKSQFSLQVTSVTAADTAVYFCASKMKSAYDITGYSEAFDIWGQGTMVTVSS

SEQ ID NO: 29381 - protein, 97 aa, Homo sapiens
VASGISMSRFWMSWVRLAPGKGLEWVANINEHGSIEYYVDSVKGRFTISRDNAKDSLYLQMDSLRVEDTAMYYCTRLGGRSNRYDYWGQGTLVTVSS

SEQ ID NO: 29382 - protein, 97 aa, Homo sapiens
VASGISMNRFWMSWVRLPPGKGLEWVANIKEDGSVRFYVDSVKGRFTISRDNAKNSLYLQMDSLRAEDSAMYYCTRLGGRSNRYDYWGQGTLVTVSS

SEQ ID NO: 29383 - protein, 103 aa, Homo sapiens
AASGFTFSSYAMHWVRQAPGKGLEWVAVISYDGSNKYYADSVKGRFTISRDNSKNTLYLQMNSLRPEDTAVYYCARDQHNWNPAELLGYMDVWGKGTTVTVSS

SEQ ID NO: 29384 - protein, 103 aa, Homo sapiens
AASGFTFSSYAMHWVRQAPGKGLEWVAVISYDGSNKYYADSVKGRFTISRDNSKNTLCLQMNSLRAEDTAVYYCARDQHNWNPAELLGYMDVWGKGTTVTVSS

SEQ ID NO: 29385 - protein, 101 aa, Homo sapiens
AASGFIFSDYDMAWIRQAPGRGLEWLSSLSRSGSPISYADSVRGRFTISRDNTETSLFLQMNSLRGEDTAIYYCARHNPQDYLGSGLLDPWGQGTLVTVSS

SEQ ID NO: 29386 - protein, 101 aa, Homo sapiens
AASGFIFSDYDMAWIRQAPGKGLEWLSSLSRSGSPISYADSVRGRFTISRDSTETSLYLQMNSLRGEDTAVYYCARHNPQDYLGSGLLDPWGQGTLVTVSS

SEQ ID NO: 29387 - protein, 106 aa, Homo sapiens
SISGGSISNFYWSWIRQPPGKGLEWIGYIYYSGSTDYNPSLKSRVTMSIDTSMNLFSLKLTSVTAADTAVYYCARSPATSLEWLLSDPYYFYMDVWGKGTTVTVSS

SEQ ID NO: 29388 - protein, 106 aa, Homo sapiens; identical to SEQ ID NO: 29387

SEQ ID NO: 29389 - protein, 106 aa, Homo sapiens
TQTLTLTCTFSGFSLTTNSMCVSWVRQPPGKALEWLARIDWDGDKHYSTSLKTRLTISKDTSKNQVVLTMTNMDPVDSATYFCARSTSGKECGDYWGQGTLVIVSS

SEQ ID NO: 29390 - protein, 106 aa, Homo sapiens
TQTLTLTCTFSGFSLTTNSMCVSWVRQPPGKSLEWLARIDWDGDKHYSSSLKTRLTISKDTSKNQVVLTMTNMDPVDSATYFCARSTSGKECGDYWGQGTLVIVSS

SEQ ID NO: 29391 - protein, 106 aa, Homo sapiens
TQTLTLTCTFSGFSLTTNSMCVSWVRQPPGKSLEWLARIDWDDDTHYNTSLRTRLTISKDTSKNQVVLTMTNMDPVDSATYFCARSTSGKECGDYWGQGALVIVSS

SEQ ID NO: 29392 - protein, 106 aa, Homo sapiens; identical to SEQ ID NO: 29389

SEQ ID NO: 29393 - protein, 105 aa, Homo sapiens
QTLTLTCTFSGFSLRTNSMCVSWVRQPPGKALEWLARIDWDDDTHYNTSLRTRLTISKDTSKNQVFLTMTNMDPVDSATYFCARSTSGKECGDYWGQGALVIVSS

SEQ ID NO: 29394 - protein, 94 aa, Homo sapiens
AASGLSVSGNFMTWVRQAPGKGLEWVSLLKSGGYTNYADSVKGRFTISRDNSKNTVYLQMNSLRVEDTAVYYCARDQIYYMDVWGKGTTVTVSS

SEQ ID NO: 29395 - protein, 94 aa, Homo sapiens
AASGLSVSGNFMTWVRQAPGKGLEWVSLLKSGGYTNYADSVKGRFTISRDNSKNTLYLQMNSLRAEDTAVYYCARDQIYYMDVWGKGTTVTVSS

SEQ ID NO: 29396 - protein, 94 aa, Homo sapiens
AASGLTVSGNYMSWVRQAPGKGLEWVSLLKSGGSTSYADSVKGRFTISRDNSKNTLYLQMNSLRAEDTAVYYCARDQIYYMDVWGKGTTVTVSS

SEQ ID NO: 29397 - protein, 94 aa, Homo sapiens
AVSGLPFSNSYMLWVRQPPGKGLVWVAHLNRDGSITTYADFVKGRFTISRDNAKNTLYLQMNSLSAEDTAVYYCARGLYQSDHWGQGTLVTVSS

SEQ ID NO: 29398 - protein, 94 aa, Homo sapiens; identical to SEQ ID NO: 29397

SEQ ID NO: 29399 - protein, 96 aa, Homo sapiens
AASGFSFSSYSINWVRQAPGKGLEWVSYINTDSSATYYADSVKGRFTISRDNAKNSLFLQMNSLRDEDTAVYFCGRDRGVATSDYWGQGTLVTVSS

SEQ ID NO: 29400 - protein, 96 aa, Homo sapiens
AASGFSFSSYSINWVRQAPGKGLEWVSYINTDSSATYYADSVKGRFTISRDNAKNSLFLEMNSLRDEDTAVYFCGRDRGVATSDYWGQGTLVTVSS

SEQ ID NO: 29401 - protein, 99 aa, Homo sapiens
KGFGYSFPTYWIGWVRQMPGKGLELMGIIYPGDSDARYSPSFEGQVTMSADKSTDTAYLQWSSLKASDTAMYYCARLQQSSTHSYGDYWGQGTLLTVSS

SEQ ID NO: 29402 - protein, 99 aa, Homo sapiens
KGFGYSFPTYWIGWVRQMPGKGLELMGIIYPGDSDARYSPSFEGQVTMSADKSIDTAYLQWSSLKASDTAMYYCARLQQSSTHSYGDYWGQGTLLTVSS

SEQ ID NO: 29403 - protein, 94 aa, Homo sapiens
ASGYTFTRYAIHWVRQAPGHRLEWMGWINGADGYTKTIEKFQGRVTFTWDASATTGYMELSSLRSDDTAVYFCARGHSYLMDVWGTGTTVTVSS

SEQ ID NO: 29404 - protein, 94 aa, Homo sapiens
ASGYTFTRYAIHWVRQAPGHRLEWMGWINGADGYTKTIEKFQGRVTFTWDASATTGYMELSSLRSDDTAVYFCARGHSYLMDVWGKGTTVTVSS

SEQ ID NO: 29405 - protein, 94 aa, Homo sapiens; identical to SEQ ID NO: 29404

SEQ ID NO: 29406 - protein, 94 aa, Homo sapiens
ASGYTFTRYAIHWVRQAPGHRLEWMGWINGADGYTKTIEKFQGRVTFTWDASATTGYMELSSLRSDDTTVYFCARGHSYLMDVWGKGTTVTVSS

SEQ ID NO: 29407 - protein, 99 aa, Homo sapiens
TVSGGSMSSYYWSWIRQPPGKGLEWIGYISYRESTNYNPSLKSRVTISVDTSKNLFSLKLSSVTAADTAVYYCARLHLFGVIENYMDVWGKGTTVTVSS

SEQ ID NO: 29408 - protein, 99 aa, Homo sapiens; identical to SEQ ID NO: 29407

SEQ ID NO: 29409 - protein, 99 aa, Homo sapiens
TVSGGSISSYYWSWIRQPPGKGLEWIGYISYRESTNYNPSLKSRVTISVDTSKSMFSLKLSSVTAADTAVYYCARLHLFGVIENYMDVWGKGTTVTVSS

SEQ ID NO: 29410 - protein, 96 aa, Homo sapiens
AASGITFKTYWMSWVRQAPGEGLVWVSSINGDVTTTSYVGSVKGRFTISRDNARNTLYLQMNSLRADDTAVYYCARVAYRAGFDIWGQGTMVTVSS

SEQ ID NO: 29411 - protein, 96 aa, Homo sapiens
AASGITFNTYWMSWVRQAPGEGLVWVSSINSDVSSTSYVGSVKGRFTISRDNARNTLYLQMNSLRAEDTALYYCARVAYRAGFDIWGQGTMVTVSS

SEQ ID NO: 29412 - protein, 96 aa, Homo sapiens
AASGITFNTYWMSWVRQAPGEGLVWVSSINSDVSTTSYVGSVKGRFTISRDNARNTLYLQMNSLRAEDTAVYYCARVAYRAGFDIWGQGTMVTVSS

SEQ ID NO: 29413 - protein, 96 aa, Homo sapiens
AASGITFNTYWMSWVRQAPGEGLVWVSSINSDVSTTSYVGSVKGRFTISRDNARKTLYLQMNSLRAEDTAVYYCARVAYRAGFDIWGQGTMVTVSS

SEQ ID NO: 29414 - protein, 96 aa, Homo sapiens
AASGFTFNSYWMSWVRQAPGEGLVWVSSINGDVTTTSYVGSVKGRFTISRDNARNTLYLQMNSLRADDTAVYYCARVAYRAGFDIWGQGTMVTVSS

SEQ ID NO: 29415 - protein, 96 aa, Homo sapiens; identical to SEQ ID NO: 29412

SEQ ID NO: 29416 - protein, 96 aa, Homo sapiens
AASGIPFNTYWMSWVRQAPGEGLVWVSSINSDMSTTSYVGSVKGRFTISRDNARKTLYLQMNSLRAEDTAVYYCARVAYRAGFDIWGQGTMVTVSS

SEQ ID NO: 29417 - protein, 103 aa, Homo sapiens
AASGFTFSNYTMHWVRQAPGKGLEWVAVISFGGSGAYYTDSVRGRFTISRDNSKNTLHLQMNGLRGEDTAVYYCVRDPEWLSEHLWASNRFDPWGQGTLVTVS

SEQ ID NO: 29418 - protein, 104 aa, Homo sapiens
AASGFTFSNYTMHWVRQAPGKGLEWVAVISFGGSGSYYTDSVRGRFTISRDNSKNTLHLQMNSLRGEDTAVYYCVRDPEWLSEHLWASNRFDPWGQGTLVTVSS

SEQ ID NO: 29419 - protein, 98 aa, Homo sapiens
AASGFTFSSYAMNWVRQAPGKGLEWVSAISGSGDSTYYADSVKGRFTTSRDNSKNTVYLQMNSLRAEDRAVYYCAKLRGPSSGCPDYWGQGTLVTVSS

SEQ ID NO: 29420 - protein, 98 aa, Homo sapiens
AASGFTFTSYGMNWVRQAPGKGLEWVSAISGSGDSTYYADSVKGRFTTSRDNSKNTVYLQMNSLRAEDTAVYYCAKLRGPSSGCPDYWGQGTLITVSS

SEQ ID NO: 29421 - protein, 96 aa, Homo sapiens
AASGITFSTYSMNWVRQAPGKGLEWVSYISDSSNKIYYADSVKGRFTISRDNAKNSLYLQMNSLRDEDTAVYYCALTNFFWYFHLWGRGTLVTVSS

SEQ ID NO: 29422 - protein, 96 aa, Homo sapiens
AASGITFSTYSMNWVRQAPGKGLEWVSYISYSSNKIYYADSVKGRFTISRDNAKNSLYLQMNSLRDEDTAVYYCALTNFFWYFHLWGRGTLVTVSS

SEQ ID NO: 29423 - protein, 97 aa, Homo sapiens
AASGFAFSNSFMNWVRRAPGKGLEWVTTASYDGSLKYYADSVKGRFTISRDNSKNTLYLQMNSLKEEDTAMYYCTRGDGHSKVFDYWGQGTLVTVSS

SEQ ID NO: 29424 - protein, 97 aa, Homo sapiens; identical to SEQ ID NO: 29423

SEQ ID NO: 29425 - protein, 98 aa, Homo sapiens
EASGFTFITYGMHWVRQAPGKGLEWVAVISYDANGKYYGDSVKGRFTISRDNSKNTVFLQMDYVSPEDTAVYYCTKSRLSSSWDYMDVWGKGTTVTVS

SEQ ID NO: 29426 - protein, 98 aa, Homo sapiens
AASGFTFITYGMHWVRQAPGKGLEWVAVISYDANGKYYGDSVKGRFTISRDNSKNTVFLQMDYVSPEDTAVYYCTKSRLSSSWDYMDVWGKGTTVTVS

SEQ ID NO: 29427 - protein, 96 aa, Homo sapiens
VSGGSISGYYWTWIRQPPGKGLEWIGYIHYTGNIQYNPSLKSRLTISLDTSKNQFSLKLTSVTATDTALYYCARHLPTATATFDYWGQGILVTVSS

SEQ ID NO: 29428 - protein, 96 aa, Homo sapiens
VSGGSISGYYWTWIRQPPGKGLEWIGYIHYTGNIECNPSLKSRLTISLDTSRNQFSLKLTSVTATDTALYYCARHLPTATATFDYWGQGILVTVSS

SEQ ID NO: 29429 - protein, 96 aa, Homo sapiens; identical to SEQ ID NO: 29427

SEQ ID NO: 29430 - protein, 106 aa, Homo sapiens
VSGFFFSGYSMEWVRQAPGGGLEWVAVLWYDGRNEHYVDSVKGRFTISRDTSKNTLYLQMNSLRAEDTATYYCARLRSRSGDDEGDDFYSYYADVWGRGTSVSVSS

SEQ ID NO: 29431 - protein, 106 aa, Homo sapiens
VSGFFFSGYSMQWVRQAPGEGLEWVAVLWYDGRTEHYVDSVKGRFTISRDTSKNTLYLQMNSLRAEDTATYYCARLRSRSGDDEGDDFYSYYADVWGRGTSVSVSS

SEQ ID NO: 29432 - protein, 106 aa, Homo sapiens; identical to SEQ ID NO: 29431

SEQ ID NO: 29433 - protein, 97 aa, Homo sapiens
ISGDSVSSNSAAWNWIRQSPSRGLEWLGGTYYRSKWYNDYAVSLKSRITINPDTSKNQFSLQLNSVTPEDTAVYYCAKESGAAFDPWGQGTLVTVSS

SEQ ID NO: 29434 - protein, 97 aa, Homo sapiens
ISGDSVSSNSAAWNWIRQSPSRGLEWLGRTYYRSKYFNDYAVSVKSRITINPDISKNQFSLQLNSVTPEDTAVYYCAKESGAAFDPWGQGTLVTVSS

SEQ ID NO: 29435 - protein, 112 aa, Homo sapiens
ASGYTFTSYGISWVRQAPGQGLEWMGWITTYNGNTNYAQKLQGRVTMTTDTSTSTAYMELRSLRSDDTAVYYCARASYHYYDSSGYYYHVSERGHTTAFDIWGQGTMVTVSS

SEQ ID NO: 29436 - protein, 112 aa, Homo sapiens; identical to SEQ ID NO: 29435

SEQ ID NO: 29437 - protein, 112 aa, Homo sapiens
ASGYTFSSYGISWVRQAPGQGLEWMGWISAYNGNTNYAQKLQGRVTMTTDTSTSTAYMELRSLRSDDTAVYYCARASYHYYDSSGYYYHVSERGHTTAFDIWGQGTMVTVSS

SEQ ID NO: 29438 - protein, 112 aa, Homo sapiens
ASGYTFTRYGISWVRQAPGQGLEWMGWISAYNGNTNYAQKVQGRVTMTTDTSTSTVYMELRSLRSDDTAVYYCARASYHYYDSSGYYYHVSERGHTTAFDIWGQGTMVTVSS

SEQ ID NO: 29439 - protein, 101 aa, Homo sapiens
AASGFTFSDAWMSWVRQAPGKGLEWVGRIKSKIDGGTPDYAAPVKGRFTISRDDSKNTLYLQMNSLKTEDTAVYYCTTVDGWGSSWYRVSWGQGTLVTVSS

SEQ ID NO: 29440 - protein, 101 aa, Homo sapiens
AASGFTFSDAWMSWVRQAPGKGLEWVGRIKSKIDGGTPDYAAPVKGRFTISRDDSKNTLYLQMNSLKIEDIAVYYCTTVDGWGSSWYRVSWGQGTLVTVSS

SEQ ID NO: 29441 - protein, 101 aa, Homo sapiens
AASGFTFSDAWMSWVRQAPGKGLEWVGRIKSKIDGGTPDYAAPVKGRFTVSRDDSENTLYLHMNSLKTEDTAVYYCTTVDGWGSSWYRVSWGQGTLVTVSS

SEQ ID NO: 29442 - protein, 101 aa, Homo sapiens
AASGFTFTDAWMNWVRQAPGKGLEWVGRIQSKIDGGTPDYAAPVKGRFTISRDDSKKTLYLQMDSLKTEDTAVYYCTTVDGWGSSWYRVSWGQGTLVTVSS

SEQ ID NO: 29443 - protein, 97 aa, Homo sapiens
AASGFTFRNYWMSWVRQAPGKGLEWVANISPDGRQRFYLDSVRGRFATSIDTTKNSLWLQLNSLRAEDTAVYYCARLGGRANRYDYWGQGTLVTVSS

SEQ ID NO: 29444 - protein, 97 aa, Homo sapiens
AASGFTFRDYWMSWVRLAPGKGLEWVANISPDGRRIFYLESVRGRFATSIDGTKNSVYLQLNSLRAEDTAVYYCARLGGRANRYDYWGQGTLVTVSS

SEQ ID NO: 29445 - protein, 97 aa, Homo sapiens
AASGFTFRDYWMSWVRQAPGKGLEWVANISPDGRQRFYLDSVRGRFATSIDSTKNSLYLQLNSLRAEDTAVYYCARLGGRANRYDYWGQGTLVTVSS

SEQ ID NO: 29446 - protein, 99 aa, Homo sapiens
AASGFTFSRYSMNWVRQAPGKGLEWVSSISSSSSFIYYADSVKGRFTISRDNAKNSLYLQMNSLRAEDTAVYYCARDLSGSYTHGFDYWGQGTLVTVSS

SEQ ID NO: 29447 - protein, 99 aa, Homo sapiens
AASGFTFSYYSMNWVRQAPGKGLEWVSSISSSSSDIYYADSEKGRFTISRDNAKNSLYLQMNSLRAEDTAVYYCARDLSGSYTHGFDYWGQGTLVTVSS

SEQ ID NO: 29448 - protein, 99 aa, Homo sapiens
AASGFTFSYYSMNWVRQAPGKGLEWVSSISSSSSYIYYADSVKGRFTISRDNGKNLLYLQMNSLRAEDTAVYYCARDLSGSYTHGFDYWGQGTLVTVSS

SEQ ID NO: 29449 - protein, 98 aa, Homo sapiens
ASGYTFSNHGISWVRQAPGQGLEWMGWISADNRSTNFAQTFRGRLTLITDTATNTAYMELRSLTSDDTAVYYCARDGFIAASGQFDYWGQGTLVTVSS

SEQ ID NO: 29450 - protein, 98 aa, Homo sapiens
ASGYTFSNHGISWVRQAPGQGLEWMGWISADNRSTNFAQTFRGRLTLTTDTATNTAYMELRSLTSDDTAVYYCARDGFIAASGQFDYWGQGTLVTVSS

SEQ ID NO: 29451 - protein, 104 aa, Homo sapiens
AASGFTFSTYTMNWVRQAPGKGLEWVSSISSSSSYIYYADSVRGRFTISRDNAKNSLYLQMNSLRAEDTAVYYCARGNWLYYDSSGYEDSGGYWGQGTLVSVSS

SEQ ID NO: 29452 - protein, 104 aa, Homo sapiens
AASGFTFSTYTMNWVRQAPGKGLEWVSSISGGSSYIYYADSVRGRFTISRDNAENSLYLQMNSLRAEDTAVYYCARGNWLYYDSSGYEDSGGYWGQGTLVSVSS

SEQ ID NO: 29453 - protein, 104 aa, Homo sapiens; identical to SEQ ID NO: 29451

SEQ ID NO: 29454 - protein, 104 aa, Homo sapiens; identical to SEQ ID NO: 29451

SEQ ID NO: 29455 - protein, 104 aa, Homo sapiens; identical to SEQ ID NO: 29451

SEQ ID NO: 29456 - protein, 104 aa, Homo sapiens; identical to SEQ ID NO: 29451

SEQ ID NO: 29457 - protein, 104 aa, Homo sapiens
AASGFTFSDHYMDWVRQAPGKGLEWVGRSRNKARSFSTEYAASVKDRFIISRDESKNSAYLQMNSLKTDDTAVYYCARDLGVGPTDYYHYMDVWGKGTTVTVSS

SEQ ID NO: 29458 - protein, 104 aa, Homo sapiens
AASGFTFSDHYMDWVRQAPGKGLEWVGRSRNKAKSFSTEYAASVKGRFTISRDESKNSAYLQMNSLKTDDTAVYYCARDLGVGPTDYYHYMDVWGKGTTVTVSS

SEQ ID NO: 29459 - protein, 97 aa, Homo sapiens
VGSGFTFSSYALSWVRQAPGKGLEYVSAINSGGNTYYVDSAKGRFTISRDISKNTLYLQMESLRAEDTAVYYCVKSAVAAIPAWLNWGQGTLVIVSS

SEQ ID NO: 29460 - protein, 95 aa, Homo sapiens
SGFTFSSYALSWVRQAPGKGLEYVSAINDVGNTFYVDSAKGRFTISRDISKNTVYLQMESLRADDTAVYYCVKSAVAAIPAWLNWGQGTLVIVSS

SEQ ID NO: 29461 - protein, 97 aa, Homo sapiens
AASGFPFSNYDMNWVRQAPGKGLEYVSAINDVGNTFYVDSAKGRFTISRDISKNTVYLQMESLRADDTAVYYCVKSAVAAIPAWLNWGQGTLVIVSS

SEQ ID NO: 29462 - protein, 97 aa, Homo sapiens; identical to SEQ ID NO: 29459

SEQ ID NO: 29463 - protein, 102 aa, Homo sapiens
AASGFTFSDYYMSWIRQAPGMGLEWISYISASSSNTLYADSVKGRFTISRDSAKNSLYLQMNSLRAEDTAVYYCARDVSTYDGHSVFAFDIWGQGTMVTVSS

SEQ ID NO: 29464 - protein, 102 aa, Homo sapiens
AASGFTFSDYYMSWIRQAPGMGLEWISYISASGSDTKYADSVKGRFTISRDSAKNSLYLQMNSLRADDTAVYYCARDVSTYDGHSVFAFDIWGQGTMVTVSS

SEQ ID NO: 29465 - protein, 102 aa, Homo sapiens
AASGFTFSDYYMSWIRQAPGMGLEWISYISASSSNTNYADSVKGRFTISRDSAKNSLYLQMNSLRAEDTAVYYCARDVSTYDGHSVFAFDIWGQGTMVTVSS

SEQ ID NO: 29466 - protein, 98 aa, Homo sapiens
VSGVSIDHNYWSWIRQAPGKGLEWIGYVSYSGTTDYNPSLRSRATISSDTSKNEVTLRLTSVTAADTAVYYCASNGYNDGYSLSLDQWGQGTLVTVSS

SEQ ID NO: 29467 - protein, 99 aa, Homo sapiens
TVSGVSINNNYWSWIRQAPGKGLEWIGYVSYSGTTDYNPSLSSRATISSDSAKNEVTLRLSSVTAADTAVYYCASNGYNDGYSLSLDQWGQGTLVTVSS

SEQ ID NO: 29468 - protein, 95 aa, Homo sapiens
AASGFTFSNYAMSWVRQAPGKGLEWVSAISGSGGSTYYADSVKGRFTISRDNSKSTLYLQMNSLRAEDTAVYYCAKLVGYSPNYWGQGTLVTVSS

SEQ ID NO: 29469 - protein, 95 aa, Homo sapiens
AASGFTFSNYAMSWVRQAPGKGLEWVSGISGSGDSTYYADSVKGRFTISRDNSKNTLYLQMNSLRAEDTAVYYCAKLVGYSPNYWGQGTLVTVSS

SEQ ID NO: 29470 - protein, 95 aa, Homo sapiens
AASGFTFSNYAMSWVRQAPGKGLEWVSAISGSGDSTYYADSVKGRFTISRDNSKSTLFLQMNSLRAEDTAVYYCAKLVGYSPNYWGQGTLVTVSS

SEQ ID NO: 29471 - protein, 95 aa, Homo sapiens
AASGFTFSNYAMSWVRQAPGKGLEWVSAISGSGDSTYYADSVKGRFTISRDNSKSTLFLQMNSLRAEDTAVFYCAKLVGYSPNYWGQGTLVTVSS

SEQ ID NO: 29472 - protein, 95 aa, Homo sapiens
SVSGGSINRYYWNWIRQAPGQGLEWIGFIYHTGRTRYNPSLASRLTMSVDTSKSRLFLKLDSVTPADTAVYYCASGNNWNYFDLWGQGTLVTVSS

SEQ ID NO: 29473 - protein, 95 aa, Homo sapiens
SVSGGSINRYYWNWIRQAPGQGLEWIGFIYHTGRTKYNPSLASRLTMSVDTSKSRLFLRLDSVTPADTAVYYCASGNNWNYFDLWGQGTLVTVSS

SEQ ID NO: 29474 - protein, 101 aa, Homo sapiens
ATSGVTFNVYSMNWVRQAPGKGLEWVSSITINTGYTNYAESVRGRFTISRDNAKNSLFLDMNSLSAGDTAVYYCVTDRRRYSSSPDGFDSWGHGTLVTVSS

SEQ ID NO: 29475 - protein, 101 aa, Homo sapiens
ATSGVTSNVYSMNWVRQAPGKGLEWVSSITINTGYTNYAESVRGRFTISRDNAKNSLFLDMNSLSADDTALYYCVTDRRRYSSSPDGFDSWGHGTLVTVSS

SEQ ID NO: 29476 - protein, 96 aa, Homo sapiens
ASGYTFNSYGISWVRQAPGQGLEWMGWISGYKGNTEYAQQLQGRVTMTTDTSTNIVYMELRSLRSEDTAVYYCARGTTVSPYFDYWGQGTLVTVSS

SEQ ID NO: 29477 - protein, 96 aa, Homo sapiens
ASGYTFNSYGISWVRQAPGQGLEWMGWISGYRGDTEYAQQFQGRVTMTADTSTNIVYMELRSLRFEDTAVYYCARGTTVSPYFDYWGQGTLVTVSS

SEQ ID NO: 29478 - protein, 100 aa, Homo sapiens
TVSGASISSSNHYWAWVRQTPGKGLEWIGNIFYTGSTYYNPSLNSRVTISLDRSKNQFSLKVTSVSAADTAVYYCARRGDRNFYYYIDVWGNGTTVTVSS

SEQ ID NO: 29479 - protein, 100 aa, Homo sapiens
TVSGASISSSNHYWAWIRQTPGKGLEWIGNIFYTGSTYYNPSLNSRVTISLDRSKNQFSLKVTSVSAADTAVYYCARRGDRNFYYYIDVWGNGTTVTVSS

SEQ ID NO: 29480 - protein, 99 aa, Homo sapiens
ISGDSVSSNSAAWNWIRQSPSRGLEWLGRTYYRVKWYNDYAVSLKSRVIISPDASKNQFSLQLNYVTPDDTAVYFCAKWDANKVALDYWSQATLVTVSS

SEQ ID NO: 29481 - protein, 99 aa, Homo sapiens
ISGDSVSSNSAAWNWIRQSPSRGLEWLGRTYYRSKWYNDYAVSLKSRIIISPDASKNQFSLQLNYVTPDDTAVYFCAKWDANKVALDYWSQATLVTVSS

SEQ ID NO: 29482 - protein, 99 aa, Homo sapiens
ISGDSVSSNTAAWNWIRQSPSSGLEWLGRTYYRSKWYNDYAVSVNSRIIINSDTSKNQFSLQLKSVTPEDTAVYYCAKWDANKVALDYWGQGTLVTVSS

SEQ ID NO: 29483 - protein, 99 aa, Homo sapiens
ISGDSVSSNTAAWNWIRQSPSRGLEWLGRTYYRSKWYNDYAVSVNSRIIINSDTSKNQFSLQLKSVTPEDTAVYYCAKWDANKVALDYWGQGTLVTVSS

SEQ ID NO: 29484 - protein, 105 aa, Homo sapiens
EGSGFSFDDYGLNWVRQVPGKGLEWVSGINRSGNRTEYVDSVKGRFTISRDNAKNSLYLQMNSLRAEDTAFYFCTREGVKWTVRMGRRSGAFDIWGQGTLVTVSS

SEQ ID NO: 29485 - protein, 105 aa, Homo sapiens
AASGFTFEDYGLSWVRQVPGKGLEWVSGINRSGNRTEYVDSVKGRFTISRDNAKNSLYLQMNSLRAEDTALYFCTREGVKWTVRMGRRSGAFDIWGQGTLVTVSS

SEQ ID NO: 29486 - protein, 105 aa, Homo sapiens
AASGFSFDDYGLSWVRQVPGKGLEWVSGINRSGNRTEYVDSVKGRFTISRDNAKNSLYLQMNSLRAEDTALYFCTREGVKWTVRMGRRSGAFDIWGQGTLVTVSS

SEQ ID NO: 29487 - protein, 100 aa, Homo sapiens
TVSGGSFSSSYWAWLRQSPGKGLEWIGYHYYTETADYNPSLKSRATISLDTSRNQFSLKLTSVTAADSAVYYCATRSLNKWLQLDDAFDTWGPGTLVTVS

SEQ ID NO: 29488 - protein, 101 aa, Homo sapiens
TVSGGSFSSSYWSWIRQSPGKGLEWIGYHYYTETTDYNPSFKDRATISLDTSKNQFSLKLTSVTAADTAVYYCATRSLNKWLQLDDAFDTWGQGTLVTVSS

SEQ ID NO: 29489 - protein, 99 aa, Homo sapiens
TVSGGSISSYYWSWIRQPPGKRLEWIGYIYSSGSTNYNPSLKSRVTISVDTSKNQFSLKLSSVTAADSAVYYCARVYDFSSGYYYYDYWGQGTLVTVSS

SEQ ID NO: 29490 - protein, 99 aa, Homo sapiens
TVSGGSISGYYWSWIRQPPGKGLEWIGYIYFSGNTNYNPSLKSRVTMSVDTSKNQFSMKLSSVTAADSAVYYCARVYDFSSGYYYYDYWGQGTQVTVSS

SEQ ID NO: 29491 - protein, 107 aa, Homo sapiens
TVFGASVYNFYWSWIRQPPGKGLEWIGDIYYSEITNYNPSLSGSTKYHPSLQSRVAISVDTSKNQVSLKLTSVSAADTAVYFCAREDVSGSMYIEVWGKGTTVIVSS

SEQ ID NO: 29492 - protein, 107 aa, Homo sapiens; identical to SEQ ID NO: 29491

SEQ ID NO: 29493 - protein, 93 aa, Homo sapiens
AASGFTFRNSDMSWVRQAPGKGLDWVSYISRSSSTIYYADSVKGRFTISRDNAKSSLYLQMNSLRDEDTAVYYCVRAWPPGDWGQGTLVTVSS

SEQ ID NO: 29494 - protein, 93 aa, Homo sapiens
AASGFTFRNSDMSWVRQAPGKGLVWVSYISTSSSIIYYADSVKGRFTVSRDNAKNSLYLQMNSLRDEDTGVYYCVRAWPPGDWGQGTLVTVSS

SEQ ID NO: 29495 - protein, 102 aa, Homo sapiens
AASGFTFSFYVMSWVRQAPGKGLEWVSGISGSGGSTYYADSVKGRFTISRDNSKNMLYLQMNSLRVEDTAVYYCVKWGLDQHSYDSSGYYSWGQGTLVTVSS

SEQ ID NO: 29496 - protein, 102 aa, Homo sapiens
AASGFTFSFYVMSWVRQAPGKGLEWVSGISGSGGSTYHADSVKGRFTISRDNSKNMLYLQMNSLRVEDTALYYCVKWGLDQHSYDSSGYYSWGQGTLVTVSS

SEQ ID NO: 29497 - protein, 95 aa, Homo sapiens
TVADGSISSGGYYWNWLRQHPGKGLEWIGYISHSGDTYYNPSLKSRVSISVGTSKNQFSLKLGSVTAADTAVYYCARGYSWLDPWGQGTLVTVSS

SEQ ID NO: 29498 - protein, 95 aa, Homo sapiens; identical to SEQ ID NO: 29497

SEQ ID NO: 29499 - protein, 104 aa, Homo sapiens
AASGFTFSSYAMHWVRQAPGKGLESVSVITSNGASTYYANSVRGRFTISRDNSKNTLYLQMGSLRPEDMAVYYCARDGPYCGGDCNPYYYFDLWGRGTLVTVSS

SEQ ID NO: 29500 - protein, 104 aa, Homo sapiens
AASGFTFSNYAMHWVRQAPGKGLESVSVITSNGATTYYAKSVRGRFAISRDNSKNTLYLQMGSLRPEDMAVYYCARDGPYCGGDCNPYYYFDLWGRGTLVTVSS

SEQ ID NO: 29501 - protein, 97 aa, Homo sapiens
TVSGGSISIFYWSWIRQPPGKGLEWIGYVYHTGDTNYNPSLKSRVTISVDTSKNKFSLKLTSVTAADTAVYYCAKQYYDRSGGFDPWGQGTLVTVSS

SEQ ID NO: 29502 - protein, 97 aa, Homo sapiens; identical to SEQ ID NO: 29501

SEQ ID NO: 29503 - protein, 97 aa, Homo sapiens
TVSGGSISIFYWSWIRQPPGKGLEWIGYVYHTGDTNYNPSLRSRVTMSVDTSKNKFSLKLTSVTPADTAVYYCAKQYYDRSGGFDPWGQGTLVTVSS

SEQ ID NO: 29504 - protein, 97 aa, Homo sapiens
TVSGGSISIFYWSWIRQAPGKGLEWIGYVYHTGETNYNPSLKSRVTISVDTSKNKFSLKLTSVTAADTAVYYCAKQYYDRSGGFDPWGQGTLVTVSS

SEQ ID NO: 29505 - protein, 99 aa, Homo sapiens
ASRFTFSNYVMTWVRQAPGEGLECVSSISPTGDSTFYADSVRGRFTISRDSSKNTLYLQMNSLRVEDTALYFCARGQRYTNAPYYMDVWGKGTTVTVSS

SEQ ID NO: 29506 - protein, 99 aa, Homo sapiens
ASRFTFTNYVMTWVRQAPGKGLECVSSLSPTGDSTFYADSVRGRFTISRDSSKNTLYLQMNSLRVEDTALYFCARGQRYTNAPYYMDVWGKGTTVTVSS

SEQ ID NO: 29507 - protein, 99 aa, Homo sapiens
ASRFTFTNYVMTWVRQAPGEGLECVSSLSPTGDSTFYADSVRGRFTISRDSSKNTLYLQMNSLRVEDTALYFCARGQRYTNAPYYMDVWGKGTTVTVSS

SEQ ID NO: 29508 - protein, 99 aa, Homo sapiens; identical to SEQ ID NO: 29505

SEQ ID NO: 29509 - protein, 101 aa, Homo sapiens
AASGFTFATYWMTWVRRSPGKGLQWVANIKQDGSEKYYVDSVKGRFTISRDNAENSLYLQMNSLRVEDTAMYYCARGDLPSSSWYWAFDIWGQGTMVTVSS

SEQ ID NO: 29510 - protein, 101 aa, Homo sapiens
AASGFTFSSYWMTWVRRSPGRGLQWVANIKQDGNEKYYVDSVKGRFTISRDNAENSLYLQMNSLRVEDTAIYYCARGDLPSSSWYWAFDIWGQGTMVTVSS

SEQ ID NO: 29511 - protein, 96 aa, Homo sapiens
VGSGFTFGSHWMNWVRLPPGKGLEWVANLGQDGSEKYSLDSVKGRFTVSRDNAKNSLFLQMNSLRVEDTAVYYCAASTVGATIAYWGQGTLVTVSS

SEQ ID NO: 29512 - protein, 96 aa, Homo sapiens; identical to SEQ ID NO: 29511

SEQ ID NO: 29513 - protein, 97 aa, Homo sapiens
AASKFPFSTYTMNWVRQAPGKGLEWVSSISSSSSYIFYADSVKGRFTISRDNAKNSLYLQMNSLRAEDTAVYYCARIGSSSADFDSWGQGTLVTVSS

SEQ ID NO: 29514 - protein, 97 aa, Homo sapiens
ATSRFPFSTYTMNWVRQAPGKGLEWVASISSTSSYIFYADSVKGRFTVSRDNAKNSLYLQMNSLTAEDTAVYYCARIGSSSADFDSWGQGTLVTVSS

SEQ ID NO: 29515 - protein, 98 aa, Homo sapiens
AASGFTFSNYWMHWLRQVPGKGLVWVSCIHGDGATSYADSVEGRFTISRDNAKNTLYLQMDSLRAEDTAFYYCAREGGVGGPGWFDPWGQGALVTVSS

SEQ ID NO: 29516 - protein, 98 aa, Homo sapiens
AASGFTFSNYWMHWLRQVPGKGLVWVSCIHGDGTTSYADSVEGRFTISRDNAKNTLYLQMDSLRAEDTAFYYCAREGGVGGPGWFDPWGQGALVTVSS

SEQ ID NO: 29517 - protein, 98 aa, Homo sapiens; identical to SEQ ID NO: 29515

SEQ ID NO: 29518 - protein, 95 aa, Homo sapiens
AASGFSVSSIYMSWVRQTPGKGLEWVSLIHISGSTTNADSVKGRFTISRDISKNTVYVQMNSLRAEDTAVYYCARGRGTWAFDAWGPGTMVTVSS

SEQ ID NO: 29519 - protein, 95 aa, Homo sapiens
AASGFSVSSIYMSWVRQTPGKGLEWVSLIHINGRTTNADSVTGRFTISRDISKNTVYVQMNSLRVEDTAVYYCARGRGTWAFDAWGPGTMVTVSS

SEQ ID NO: 29520 - protein, 95 aa, Homo sapiens
AASGFSVSSIYMSWVRQTPGKGLEWVSLIHINGRTTNADSVRGRFTISRDISKNTVDVQMNSLRAEDTAVYYCARGRGTWAFDAWGPGTMVTVSS

SEQ ID NO: 29521 - protein, 111 aa, Homo sapiens
TASGFNFGDYGMTWVRQAPGKGLEWIGFIKSHHYGGTTEYAASVKGRFTISRDDSNSIGYLQMNSLKTEDTAVYYCTRDIHYGFWSGRGRNWPRIALIDSWGQGTLVTVSS

SEQ ID NO: 29522 - protein, 111 aa, Homo sapiens; identical to SEQ ID NO: 29521

SEQ ID NO: 29523 - protein, 111 aa, Homo sapiens
TASGFNFGDYGMTWVRQAPGKGLEWIGFIKSHHYDGTTEYAASVKGRFTISRDDSNSIGYLQMNSLKTEDTAVYYCTRDIHYGFWSGRGRNWPRIALIDSWGQGTLVTVSS

SEQ ID NO: 29524 - protein, 93 aa, Homo sapiens
ASGYTFTTYDIHWVRQASGQGLEWMGWMNPHSGNTGYAQIFQGRVTMTRDTSISTAYMELSSLTSDDTALYYCTRRPFPSEYWGQGTLVTVSS

SEQ ID NO: 29525 - protein, 93 aa, Homo sapiens
ASGYTFTTYDIHWVRQASGQGLEWMGWMNPHSGNTGYAQNFQGRVTMTRDTSISTAYMELSSLTSDDTALYYCTRRPFPSEYWGQGTLVTVSS

SEQ ID NO: 29526 - protein, 95 aa, Homo sapiens
EVSGLPFSSNWMSWLRLAPGKGLEWVANINPDGGGENYLDSVKGRFTISRDNAKNLLSLQMSSLRAEDTSVYYCARDGRGFSLNWGQGTQVTVSS

SEQ ID NO: 29527 - protein, 95 aa, Homo sapiens
EVSGLPFSSNWMSWLRLAPGKGLEWVANIDPDGGGENYLDSVKGRFTISRDNARNFLFLQMSSLRAEDTSVYYCARDGRGFSLNWGQGTQVTVSS

SEQ ID NO: 29528 - protein, 101 aa, Homo sapiens
SVSGGSISTYYWSWIRQPPGKGLEWIGFISDSGNTNYNPSLKSRVTISVDTSKNQFSLKLNFVTAADTAVYYCARHGPDCTSTTCYQFDYWGQGTLVTVSS

SEQ ID NO: 29529 - protein, 101 aa, Homo sapiens
TVSGGSISTYYWSWIRQPPGKGLEWLGFISDSGSTNYNPSLESRVTISVDTSKNQFSLKLNFVTAADTAVYYCARHGPDCTSTTCYQFDYWGQGSLVTVSS

SEQ ID NO: 29530 - protein, 101 aa, Homo sapiens; identical to SEQ ID NO: 29529

SEQ ID NO: 29531 - protein, 101 aa, Homo sapiens
ASGYSFTNYAISWVRQAPGQGLEWMGWINVNNGNTDYPQKFQGRVTMSTDRLTTTVYMELRSLRSDDTAVYYCARDRRIGTMVTQSGMDVWGNGTTVTVSS

SEQ ID NO: 29532 - protein, 101 aa, Homo sapiens
ASGYSFSNYAISWVRQAPGQGLEWMGWINVNNGNTDYPQKFQGRVTMSTDRLTTTVYMELRSLRYDDTAVYYCARDRRIGTMVTQSGMDVWGNGTTVTVSS

SEQ ID NO: 29533 - protein, 101 aa, Homo sapiens
ASGYTFTNYAISWVRQAPGQGLEWMGWINVNNGNTDYPQKFQGRVTLSIDRLTTTVYMELRSLRSDDTAVYYCARDRRIGTMVTQSGMDVWGNGTTVTVSS

SEQ ID NO: 29534 - protein, 97 aa, Homo sapiens
AASGFTFSDDSMSWVRQAPGKGLEWVANIKKDGSEKYYVDSVKGRFTISRDNAKNSLYLQMNSLRAEDTAVYYCARGWGLRYIFDYWGPGTLVTVSS

SEQ ID NO: 29535 - protein, 97 aa, Homo sapiens
AASGFTFSSDSMSWVRQAPGKGLEWVANIKKDGSEKYYVDSVKGRFTISRDNAKNSLYLQMNSLRAEDTAVYYCARGWGLRYIFDYWGPGTLVTVSS

SEQ ID NO: 29536 - protein, 97 aa, Homo sapiens
AASGFIFSDDSMSWVRQAPGKGLEWVANINKDGNEKYFADSVKGRFTISRDNAKNSLSLQMNSLRAEDTAVYYCARGWGLRYIFDYWGPGTLVTVSS

SEQ ID NO: 29537 - protein, 99 aa, Homo sapiens
VASGFTLSTHAMTWVRQAPGKGLEWVSSISVGGDYTYYIDSVKGRFTISRDNSKNTLYLQMNSLRVEDTAIYYCAKFQSVTGKATFDYWGRGALVTVSS

SEQ ID NO: 29538 - protein, 99 aa, Homo sapiens
VGSGLTLSTYAMTWVRQAPGKGLEWVSAMSLSGENTYYTDSVRGRFTISRDNSKNTLYLQMNSLRVEDTAIYYCAKFQSVTGKATFDYWGRGALVTVSS

SEQ ID NO: 29539 - protein, 98 aa, Homo sapiens
VASGFTLTTYAMTWVRQAPGKGLEWVSAINVIDTTYYTDSVRGRFTISRDNSKNTLYLQMNSLRVEDTAIYYCAKFQSVTGKATFDYWGRGALVTVSS

SEQ ID NO: 29540 - protein, 97 aa, Homo sapiens
AASGFTFNTCWMNWVRQAPGKGLEWVANIKQDSSEKHFADSVKGRFTISRDNAKNSLYLQMDNLRDEDTAVYYCVRSCSRTAPRDFWGQGTLVTVSS

SEQ ID NO: 29541 - protein, 97 aa, Homo sapiens
AASGFTFKTCWMNWVRQAPGKGLEWVANIKPDSSDKGFADSVRGRFTISRDNAKNSLFLQMNNLRDEDTAVYYCVRSCSRTAPRDFWGQGTLVTVSS

SEQ ID NO: 29542 - protein, 106 aa, Homo sapiens
AASGFTFNSFPMTWVRQAPGKGLEWVSAISGSGGTTYFADSVKGRFTISRDNSKSTLYLQMNSLRAEDTAVYYCARRGDCSGGSCYYYYYSYMDVWGKGTTVTVSS

SEQ ID NO: 29543 - protein, 105 aa, Homo sapiens
AASGFTFSSFPMTWVRQSPGKGLEWVSAISGSGGTTYYADSVKGRFTISRDNSRSTLYLQMDSLRAEDTALYYCARRGDCSGGSCYYYYYSYMDVWGKGTTVTVS

SEQ ID NO: 29544 - protein, 105 aa, Homo sapiens
AASGFTFSSFPMTWVRQSPGKGLEWLSAISGSGGTTYYADSVKGRFTISRDNSRSTLYLQMGSLRAEDTALYYCARRGDCSGGSCYYYYYSYMDVWGKGTTVTVS

SEQ ID NO: 29545 - protein, 105 aa, Homo sapiens
AASGFTFSRFPMTWVRQAPGKGLEWVSAISGSGGTTYYADSVKGRFTISRDNSRSTLYLQMDSLRAEDTALYYCARRGDCSGGSCYYYYYSYMDVWGKGTTVTVS

SEQ ID NO: 29546 - protein, 102 aa, Homo sapiens
AASGFIFSSYWMSWVRQAPGKGLEWVANIKQDGSEKYYVDSVKGRFTISRDNAKNSLYLQMNSLRAEDTAVYFCAREPLCSTKRCPPRFDPWGQGTLVTISS

SEQ ID NO: 29547 - protein, 102 aa, Homo sapiens
AASGFTFSSYWMSWVRQAPGKGLEWVANIKQDGSEKYYVDSVKGRFTISRDNAKNSLYLQMNSLRAEDTALYFCAREPLCSTKRCPPRFDPWGQGTLVTVSS

SEQ ID NO: 29548 - protein, 108 aa, Homo sapiens
TVSGGSISSGGYYWSWIRQHPGKGLEWIGYIYYSGSTYYNPSLKSRVTISVDTSKNQFSLKLNSVTAADTAVYYCARGGYHSTRRHPPRKRDYYMDVWGTGTTVTVSS

SEQ ID NO: 29549 - protein, 108 aa, Homo sapiens
TVSGGSISSGGHYWSWIRQHPGKGLEWIGYIYYTGSTYYNPSLKSRVTISLDTSKNQVSLRLNSVTAADTAVYYCARGGYHSTRRHPPRKRDYYMDVWGTGTTVTVSS

SEQ ID NO: 29550 - protein, 108 aa, Homo sapiens
TVSGGSISSGGYYWSWIRQHPGKGLEWIGYIYYSGSTYYNPSLKSRVTISVDTSKNQFSLKLSSVTAADTAVYYCARGGYHSTRRHPPRKRDYYMDVWGTGTTVTVSS

SEQ ID NO: 29551 - protein, 108 aa, Homo sapiens
IVSGGSISSGGYYWNWIRQRPGKGLEWIGYISYSGSTFYNPSLNRRVTISVDTSKNQFSLKLNSVTAADTAVYYCARGGYHSTRRHPPRKRDYYMDVWGTGTTVTVSS

SEQ ID NO: 29552 - protein, 107 aa, Homo sapiens
VSGGSVGSGGYYWSWIRQHPGKGLEWIGYIYYSGTTHYMPSLKSRVAISLATSKNQFSLKLNSVTAADTAVYYCARGGYHSTRRHPPRKRDYYMDVWGTGTTVTVSS

SEQ ID NO: 29553 - protein, 98 aa, Homo sapiens
AASGFTFSNFGMHWVRQAPGKGLEWVSAIGANGDNTYYADSVKGRFTISRDNSRSTLYMQMNSLRAEDTAVYYCAKRDTVVTHGFDYWGQGTLVTVSS

SEQ ID NO: 29554 - protein, 98 aa, Homo sapiens
AASGFTFSNFGMHWVRQAPGKGLEWVSAIGANGDNTYYADSVKGRFTISRDNSRSTLYMQMNSLRGEDTAVYYCAKRDTVVTHGFDYWGQGTLVTVSS

SEQ ID NO: 29555 - protein, 97 aa, Homo sapiens
GFNFNNSGLGWVRQAPGKGLEWVSGITISGGGSYYAGSVKGRFTVSRDNSKNTLYLHMNSLRVEDTAVYYCVKGATNWNFLYYMDVWGKGTTVTVAS

SEQ ID NO: 29556 - protein, 100 aa, Homo sapiens
AGTGFNFNNSGLGWVRQAPGKGLEWVSGITISGGGSYYAGSVKGRFTVSRDNSKNTLYLQMNGLRVEDTAVYYCVKGATNWNFLYYMDVWGKGTTVTVAS

SEQ ID NO: 29557 - protein, 94 aa, Homo sapiens
AASGFAFSKSWMYWVRQGPGKGLVWVSRINSDGSSISYADSVKGRFTISRDNAKNTLYLQMNSLRVNDTAIYYCAGPYNYFDYWGQGTLVTVSS

SEQ ID NO: 29558 - protein, 94 aa, Homo sapiens
AASGFAFSNSWMYWVRQGPGKGLVWVSRINSDGSSISYADSVKGRFTISRDNAKNTLYLQMNSLRVDDTAVYYCAGPYNYFDYWGQGTLVTVSS

SEQ ID NO: 29559 - protein, 97 aa, Homo sapiens
AASGFTFSDHQMSWIRQAPGKGLEWLSLITRSGENVYYADSVKGRFTISRDNTKNLLYLQMSSLRAEDTAVYYCARDPDTSDKVDYWGQGTLVTVSS

SEQ ID NO: 29560 - protein, 97 aa, Homo sapiens
AASGFTFRDHQMSWIRQAPGKGLEWLSLITRSGDNVYYADSVKGRFTISRDNTKNLLYLQMSSLRAEDTAVYYCARDPDTSDKVDYWGQGTLVTVSS

SEQ ID NO: 29561 - protein, 97 aa, Homo sapiens
AASGFTFRDHQMSWIRQAPGKGLEWLSLITRSGDNVYYADSVRGRFTISRDNTNNLLYLQMSSLRADDTAVYYCARDPDTSDKVDYWGQGTLVTVSS

SEQ ID NO: 29562 - protein, 94 aa, Homo sapiens
ASGYSFTSYSMHWVRQAPGQGLEWMGVINPSGGSTSHAQKFQGRVTMTRDTSTRTLYIELSSLKSDDTAVYYCAREGNDWGDFWGQGTLVTVSS

SEQ ID NO: 29563 - protein, 94 aa, Homo sapiens
ASGYSFTSYSMHWVRQAPGQGLEWMGVINPSGGSTSHAQKFQGRVTMTRDTSTRTLYMELSSLKSDDTAVYYCAREGNDWGDFWGQGTLVTVSS

SEQ ID NO: 29564 - protein, 104 aa, Homo sapiens
AASGFTFSPYEMNWVRQAPGKGLEWISYISGSGDTIYYADSVEGRFTISRDNAKNSLYLQMNSLRAGDTAVYYCVRGGYCSSTLCYNLNAFDIWGQGTVVTVSS

SEQ ID NO: 29565 - protein, 104 aa, Homo sapiens
AASGFTFSPFEMNWVRQAPGKGLEWVSYISGSSDTIYYADSVEGRFTISRDNAKNSLYLQMNSLRAEDTAVYYCVRGGYCSSTLCYNLNAFDIWGQGTMVTVSS

SEQ ID NO: 29566 - protein, 104 aa, Homo sapiens
AASGFTFSPYEMNWVRQAPGKGLEWVSYISGSGDTIYYADSVEGRFTISRDNARNSLYLQMNSLRAEDTAVYYCVRGGYCSSTLCYNLNAFDIWGQGTMVTVSS

SEQ ID NO: 29567 - protein, 104 aa, Homo sapiens
AASGFTFSPFEMNWVRQAPGKGLEWVSYISGSGDTIYYADSVEGRFTISRDNAKNSLYLQMNTLRAEDTAVYYCVRGGYCSSTLCYNLNAFDIWGQGTVVTVSS

SEQ ID NO: 29568 - protein, 109 aa, Homo sapiens
TVSNGSISSSFYWNWIRQPPGKTLESIGYISFSGSTNYNPTLKSRVTISVDTSKNQFSLSLNSVTTADTAVYFCARGSKGYISGWYGAVPNYYYHMDVWGKGTSVTVSS

SEQ ID NO: 29569 - protein, 109 aa, Homo sapiens
TVSNGSISSSFYWNWIRQPPGKTLESIGYISFSGSTNYNPSLKSRVTISVDTSKNQFSLSLNSVTTADTAVYFCARGSKGYISGWYGAVPNYYYHMDVWGKGTSVTVSS

SEQ ID NO: 29570 - protein, 95 aa, Homo sapiens
ASGYNFRAYAIHWVRQAPGRRLEWMGWINAGTGDRNCAQRFQGRVTITRDTSANTAYMELSSLSSEDTALYYCARPGRDAAFDYWGQGTLVTVSS

SEQ ID NO: 29571 - protein, 95 aa, Homo sapiens
ASGYTFTDFAIHWVRQAPGQRLEWMGWISAKTGDRKCSQKFQGRVTITRDTSAKTAYMELSGLTSEDTAVYYCARPGRDAAFDYWGQGTLVTVSS

SEQ ID NO: 29572 - protein, 96 aa, Homo sapiens
AASGFTVSTNYMSWVRQAPGKGLEWVSVIDTAGRASYTDSVKGRFTISRDNSKNTLYLQMNSLRAEDTAVYYCARGVGGYGVWYTWGQGTLVTVSS

SEQ ID NO: 29573 - protein, 96 aa, Homo sapiens
AASGFTVSSDYMSWVRQAPGKGLQWVSVIDGAGRASYTDSVKGRFTISRDTSKNTLSLQMNSLRAEDTAVYYCARGVGGYGVWYTWGQGTLVTVSS

SEQ ID NO: 29574 - protein, 96 aa, Homo sapiens
AASGFTVSSDYMSWVRQAPGKGLEWVSVIDGAGRASYTDSVKGRFTISRDNSKNTLYLQMNSLRAEDTAVYYCARGVGGYGVWYTWGQGTLVTVSS

SEQ ID NO: 29575 - protein, 96 aa, Homo sapiens
AASGFTVSSDYMSWVRQAPGKGLEWVSVIDSAGRASYTDSVKGRFTISRDNSKNTLYLQMNSLRAEDTAVYYCARGVGGYGVWYTWGQGTLVTVSS

SEQ ID NO: 29576 - protein, 102 aa, Homo sapiens
ASGYTFASYTITWVRQAPGQGLEWMGWISVYNGDTNYAQKFQGRVTMTTDTSTSTAYMELRSLRSDDTAVYYCARIGFWSGRYLYYYYMDVWGKGTTVTVSS

SEQ ID NO: 29577 - protein, 102 aa, Homo sapiens
ASGYTFTSYTISWVRQAPGQGLEWMGWISVYNGDTNYAQKLQGRVTMTTDTSTSTAYMELRSLRSDDTAVYYCARIGFWSGRYLYYYYMDVWGKGTTVTVSS

SEQ ID NO: 29578 - protein, 97 aa, Homo sapiens
AVYGGSFSDNYWSWIRQHPGKGLEWIGEINHSGSSNYNPSLKSRVTISVDTSKNHFSLKLSSVTAADTAVYYCARGARWLKNRFDFWGQGTLVTVSS

SEQ ID NO: 29579 - protein, 97 aa, Homo sapiens
AVYGGSFSDNYWSWIRQHPGKGLEWIGEINHSGSTNYNPSLKSRVTISVDTSKNHFSLKLSSVTAADTAVYYCARGARWLKNRFDFWGQGTLVTVSS

SEQ ID NO: 29580 - protein, 96 aa, Homo sapiens
AASGFTFNSYWMTWVRQAPGKGLEWVANIKEDGSQKYYVDSVKGRFTISRDDPKSSLYLQMNFLGVVDTAVYFCARGGRNGALDIWGHGTLVTVSS

SEQ ID NO: 29581 - protein, 96 aa, Homo sapiens
AASGFTFSTYWMTWVRQAPGKGLEWVGNIKEHGSDTYYVDSVKGRFTISRDDPSNSLYLQMNFLGVVDTAVYYCARGGRNGALDIWGHGTLVTVSS

SEQ ID NO: 29582 - protein, 96 aa, Homo sapiens
AASGFTFSTYWMTWVRQAPGKGLEWVGNIKEDGSDTYYVDSVKGRFTISRDDPKNSLYLQMNFLGVVDTAVYYCARGGRNGALDIWGHGTLVTVSS

SEQ ID NO: 29583 - protein, 96 aa, Homo sapiens
AASGFTFSTYWMTWVRQAPGKGLEWVGNIKEDGSDTYYVDSVKGRFTISRDDPNNSLYLQMNFLGVVDTAVYYCARGGRNGALDIWGHGTLVTVSS

SEQ ID NO: 29584 - protein, 96 aa, Homo sapiens
AASGFTFSTYWMTWVRQAPRKGLEWVGNIKEDGSDTYYVDSVKGRFTISRDDPNNSLYLQMNFLGVVDTAVYYCARGGRNGALDIWGHGTLVTVSS

SEQ ID NO: 29585 - protein, 96 aa, Homo sapiens
AASGFTFSTYWMTWVRQPPGKGLEWVGNIKEDGSETHYVDSVKGRFTISRDDPKNSLYLQMNFLGVVDTAVYYCARGGRNGALDIWGHGTLVTVSS

SEQ ID NO: 29586 - protein, 96 aa, Homo sapiens
AASGFTLSTYWMTWVRQAPGKGLEWVGNIKEDGSEKYFVDSVKGRFTISRDDPKNSVYLQMNFLGAVDTAVYYCARGGRNGALDIWGHGTLVTVSS

SEQ ID NO: 29587 - protein, 96 aa, Homo sapiens
ATSGFTFSTYWMTWVRQAPGKGLEWVGNIKEDGSDTYYVDSVKGRFTISRDDPKNSLYLQMNFLGVVDTAVYYCARGGRNGALDIWGRGTLVTVSS

SEQ ID NO: 29588 - protein, 96 aa, Homo sapiens; identical to SEQ ID NO: 29582

SEQ ID NO: 29589 - protein, 96 aa, Homo sapiens
AASGFTFSTDWMTWVRQAPGKGLEWVGNIKEHGSDTYYVDSVKGRFTISRDDPSNSLYLQMNFLGVVDTAVYYCARGGRNGALDIWGHGTLVTVSS

SEQ ID NO: 29590 - protein, 96 aa, Homo sapiens
AASGFTFSSYWMTWVRQAPGKGLEWVGNIKEDGSEKYYVDSVKGRFTISRDDPKNSLYLQMNFLGVVDTAVYYCARGGRNGALDIWGHGTLVTVSS

SEQ ID NO: 29591 - protein, 96 aa, Homo sapiens
AASGFTFSTYWMTWVRQAPGKGLEWVGNIKEDGSEKYYVDSVKGRFTISRDDPKNSLYLQMNFLGVVDTAVYYCARGGRNGALDIWGHGTLVTVSS

SEQ ID NO: 29592 - protein, 95 aa, Homo sapiens
AASGFTFSTYWMTWVRQAPGKGLEWVGNIKEHGSDTYYVDSVKGRFTISRDDPSNSLYLQMNFLGVVDTAVYYCARGGRNGALDIWGHGTLVTVS

SEQ ID NO: 29593 - protein, 101 aa, Homo sapiens
TVSAASISSYSWNWIRQPPGKGLEWIGYIYESGSTNYNPSLKSRVSISVDTSKNEISLKLSSVTAADTAVYFCARSGATIFGVVIPGFDSWGQGTLVTVSS

SEQ ID NO: 29594 - protein, 101 aa, Homo sapiens
TVSAASISSYSWNWIRQPPGKGLEWIGYIYDSGSTNYNPSLKSRVSISVDTSKNEFSLRLTSVTAADTAVYFCARSGATIFGVVIPGFDSWGQGTLVTVSS

SEQ ID NO: 29595 - protein, 101 aa, Homo sapiens
TVSGASISSYSWNWIRRPPGKGLEWIGYIYESGSTTYSPSLKSRVSISVDTSKNEFSLKLSSVTPADTAVYFCARSGATIFGVVIPGFDSWGQGTLVTVSS

SEQ ID NO: 29596 - protein, 101 aa, Homo sapiens; identical to SEQ ID NO: 29595

SEQ ID NO: 29597 - protein, 101 aa, Homo sapiens
TVSAASISSYSWNWIRRPPGKGLEWIGYIYESGSTNYSPSLKSRVSISVDTSKNEFSLKLSSVTAADTAVYFCARSGATIFGVVIPGFDSWGQGTLVTVSS

SEQ ID NO: 29598 - protein, 101 aa, Homo sapiens
TVSAASIRSYSWNWIRQPPGKGLEWIGDISKSGSTNYNPSLKSRVSISVDTSKNEISLKLSSVTAADTAVYFCARSGATIFGVVIPGFDSWGQGTLVTVSS

SEQ ID NO: 29599 - protein, 101 aa, Homo sapiens; identical to SEQ ID NO: 29594

SEQ ID NO: 29600 - protein, 101 aa, Homo sapiens
TVSTGSITSYSWNWIRQPPGKGLEWIGYIYDSGSTNYNPSLKSRVSISVDTSKNEFSLKLSSVTAADTAVYFCARSGATIFGVVIPGFDSWGQGTLVTVSS

SEQ ID NO: 29601 - protein, 99 aa, Homo sapiens
AASGFTFSNYLMHWVRQAPGKGLEWVSSISSGSTYLNYADSVKGRFTISRDNDRNSLYLEMNSLRAEDTAIYFCATPLVRAYSYYMDVWGKGTTVTVSS

SEQ ID NO: 29602 - protein, 99 aa, Homo sapiens
AASGFTFSNYLMHWVRQAPGKGLEWVSSISSGSTYLNYADSVKGRFTISRDNDRNSLYLEMNSLRAEDTAIYFCATPLVRAYSYYMDVWGKGTTVSVSS

SEQ ID NO: 29603 - protein, 97 aa, Homo sapiens
ASGFRFSSRAMSWVRQAPGKGLEWVSSINGQGSGIYYTDSVQGRFTISRDNSKNTLYLQMDGLRAEDTARYYCAREIQYQLLAIDSWGQGTLVTVSS

SEQ ID NO: 29604 - protein, 97 aa, Homo sapiens; identical to SEQ ID NO: 29603

SEQ ID NO: 29605 - protein, 102 aa, Homo sapiens
ASGFTFERHTMNWVRQAPGKGPEWIAHISVTDSHISGSRRFTATYYADSVKGRFTISRDDAENSLYLDMGSLRDEDAAVYYCAKSLTEFDLWGQGTLVTVSS

SEQ ID NO: 29606 - protein, 103 aa, Homo sapiens
VASGFTFERETMNWVRQAPGKGPEWISHISVTDSHISGSRRFTATYYADSVKGRFTISRDDAKNTLFLDMSSLRDEDTAVYYCAKSLTEFDLWGQGTLVTVSS

SEQ ID NO: 29607 - protein, 102 aa, Homo sapiens
ASGFTFERDTMNWVRQAPGKGPEWIAHISVTDSHISGSGRFTATYYADSVKGRFTISRDDAKNSLYLDMSSLRDEDTAVYYCAKSLTEFDLWGQGTLVTVSS

SEQ ID NO: 29608 - protein, 99 aa, Homo sapiens
AASGFTVSSSYMSWVRQAPGKGLEWVSVIYSGGNTYYADSVKGRFTISRDNSKNTLYLQMNSLRAEDTAVYYCARELPRSAYSSGWNYWGQGTLVTVSS

SEQ ID NO: 29609 - protein, 99 aa, Homo sapiens
AASGFTVSSNYMSWVRQAPGKGLEWVSVIYSGGSTYYADSVKGRFTISRDNSKKTLYLQMNSLRAEDTAVYYCARELPRSAYSSGWNYWGQGTLVTVSS

SEQ ID NO: 29610 - protein, 99 aa, Homo sapiens
AASGFTVSSNYMSWVRQAPGKGLEWVSVIYSGGTTYYADSVKGRFTISRDNSKNTLYLQMNSLRAEDTAVYYCARELPRSAYSSGWNYWGQGTLVTVSS

SEQ ID NO: 29611 - protein, 98 aa, Homo sapiens
ASAYTFTSYGITWVRQAPGQGLEWMGWITAYNANTNYAQKLQGRVTMTTDTSTSTAYMELRSLRSDDTAVYYCARAYSGSYFDWFDPWGQGTLVTVSS

SEQ ID NO: 29612 - protein, 98 aa, Homo sapiens
ASGYTFTSYGITWVRQAPGQGLEWMGWISAYNGNTNYAQKLQGRVTMTTDSSTSTAYMELRSLRSDDTAVYYCARAYSGSYFDWFDPWGQGTLVTVSS

SEQ ID NO: 29613 - protein, 105 aa, Homo sapiens
AASGFTFSSYGMNWVRQAPGKGLEWVAVISYDGSNKYYVDSVKGRFTISRDNSESTLYLQMNSLRAEDTAVYYCAKDDKGGSRQEFYYYYYMDVWGKGTTVTVSS

SEQ ID NO: 29614 - protein, 105 aa, Homo sapiens
AASGFTFSSYAMNWVRQAPGKGLEWVAVISYDGSHKYYVDSVKGRFTISRDNSESTLYLQMNSLRAEDTAVYYCAKDDKGGSRQEFYYYYYMDVWGKGTTVTVSS

SEQ ID NO: 29615 - protein, 105 aa, Homo sapiens
TVSGGSISTATYYWGWIRQPPGKGLEWIGSMYYSGSTYYNPSLKSRVTMSVDTSKNQFSLKLRSVTAADTAVYYCARHPLSITPRPDLRNWFDPWGQGTLVIVSS

SEQ ID NO: 29616 - protein, 105 aa, Homo sapiens
TVSGGSISTATYYWGWIRQPPGKGLEWIGSMYYSGSTYYNPSLKSRVTMSVDTSKNQFSLQLRSVTAADTAVYYCARHPLSITPRPDLRNWFDPWGQGTLVTVSS

SEQ ID NO: 29617 - protein, 99 aa, Homo sapiens
AASGFTFSNWEMHWVRQAPGKGLEWVSRVESDGSSTSYADSVKGRVTVSRDNAKKTLYLEMKNLRVEDSAVYYCARWATTRGIDFFDQWGHGTLVTVSS

SEQ ID NO: 29618 - protein, 99 aa, Homo sapiens
AASGFTFSNWEMHWVRQAPGKGLEWVSRIGSDGSYTSFADSVRGRVTVSRDNAKKMLYLEMKNLRVEDSAVYYCARWATTRGIDFFDQWGHGTLVTVSS

SEQ ID NO: 29619 - protein, 100 aa, Homo sapiens
AASGFTFSGSAIHWVRQASGKGLEWVGRIRGDSKSYTTAYSASVKGRFTISRDDSESTAYLQMSSLKIEDTAVYYCARGTWGSSWYNDYWGRGTLVTVSS

SEQ ID NO: 29620 - protein, 100 aa, Homo sapiens
AASGFTFSGSAIHWVRQASGKGLEWVGRIRGDSKSYTTAYSASVKGRFTISRDDSESTAYLQMSSLKIEDTAVYYCARGTWGSSWYNDYWGQGTLVTVSS

SEQ ID NO: 29621 - protein, 101 aa, Homo sapiens
AASGFTFISYGMHWVRQAPGKGLEWVAVISFDGSIKYMADSVEGRFTISRDNSKSTLYLQMNSLRIEDTAIYYCARARSPMSTAGWGIGYWGQGTQVTVSS

SEQ ID NO: 29622 - protein, 101 aa, Homo sapiens
AASGFTFITYGMHWVRQAPGKGLEWVAVISYDGRIKYIADSVEGRFTISRDNSKSTLYLQMNSLRAEDTAIYYCARARSPMSTAGWGIGYWGQGTQVTVSS

SEQ ID NO: 29623 - protein, 100 aa, Homo sapiens
TVSGGSISSYYWSWIRQPPGKGLEWIGYIYYSGSTNYNPSLKSRVTISLDPSKNQFSLKLSSVTAADTAVYYCARSGAGGYYYYYYMDVWGKGTTVTVSS

SEQ ID NO: 29624 - protein, 100 aa, Homo sapiens
TVSGGSISSYYWSWIRQPPGKGLEWIGYIYYSGSTNYNPSLKSRVTISLDTSKNQFSLKLSSVTAADTAVYYCARSGAGGYYYYYYMDVWGKGTTVTVSS

SEQ ID NO: 29625 - protein, 103 aa, Homo sapiens
KGSGYSFTNSWIGWVRQMPGEGLEWMGIIYPDDSDTRYSPSFQGQVTISADKSISTAYLQWSSLKASDTAMYYCARPPGYCSSSSAGCYFDSWGQGTLVTVSS

SEQ ID NO: 29626 - protein, 103 aa, Homo sapiens
KGSGYSFAKSWIGWVRQMPGEGLEWMGIIYPDDSDTRYSPSFQGQVTISADKSISTAYLQWSSLRASDSAMYYCARPPGYCSSSSAGCYFDSWGQGTLVTVAS

SEQ ID NO: 29627 - protein, 99 aa, Homo sapiens
TASGFTFGDYGMSWFRQAPGKGLEWVGFIRSKAYGGTTEYAASVKGRFTISRDDSKSIAYLQMNSLKTEDTAVYYCTRGHPRFGEIVYWGQGTLVTVSS

SEQ ID NO: 29628 - protein, 99 aa, Homo sapiens
TASGFTFGDYAMSWFRQAPGKGLEWVGFIRSKGYGGTTEYAASAKGRFIISRDDPKSIAYLQMNSLKTEDTAVYYCTRGHPRFGEIVYWGQGTLVTVSS

SEQ ID NO: 29629 - protein, 99 aa, Homo sapiens
TASGFTFVDYAMSWFRQAPGKGLEWVGFIRRKAYGGTTEYAASVKGRFTISRDDSKSIAYLQMNSLKTEDTAVYYCTRGHPRFGEIVYWGQGTLVTVSS

SEQ ID NO: 29630 - protein, 101 aa, Homo sapiens
AASGLTFSGSGIHWVRQASGKGLEWVGRIRNRANSYATAYAASVKGRFTISRDDLKNTAYLQMNSLKTEDTAVYYCATPGVSSGYYVLDHWGQGTLVTVSS

SEQ ID NO: 29631 - protein, 101 aa, Homo sapiens
AASGLTFSGSGIHWVRRASGKGLEWIGRIRNRANNYATAYAASIKGRFTISRDDLKNTAYLQMNSLKTEDTAVYYCATPGVSSGYYVLDHWGQGTLVTVSS

SEQ ID NO: 29632 - protein, 101 aa, Homo sapiens
AASGFPFTSHAMTWVRQPPGKGLEWVALISDTGDDAYYSDSVEGRFTISRDNAKNTVDLQMNSLSGEDTALYYCAKINYWTKGGYDYFDYWGQGVLVTVSS

SEQ ID NO: 29633 - protein, 101 aa, Homo sapiens; identical to SEQ ID NO: 29632

SEQ ID NO: 29634 - protein, 101 aa, Homo sapiens
AASGFPFTSHAMTWVRQAPGKGLEWVALISDTADDAYYSDSVEGRFTISRDNAKNTVDLQMNNLSGEDTALYYCAKINYWTKGGYDYFDYWGQGVLVTVSS

SEQ ID NO: 29635 - protein, 97 aa, Homo sapiens
KGSGDRFTSYWIGWVRQMPGKGLEWMAIFNPDDSETRYSPPFQGQVTMSVDKSSSTAYLQWGSLQASDTAMYFCARHPRSSSWFDPWGQGTQVTVSS

SEQ ID NO: 29636 - protein, 97 aa, Homo sapiens
KGSADTFTTYWIAWVRQKPGKGLEWMAIFNPDDSETRFTPSFRGQVTMSVDKSINTAYLHWDSLQASDSAMYFCARHPRSSSWFDPWGQGTLVTVSS

SEQ ID NO: 29637 - protein, 97 aa, Homo sapiens
KGSADTFTTYWIGWVRQKPGKGLEWMAIFNPDDSETRYTPSFRGQVTMSVDKSISTAYLHWDSLQASDTAMYFCARHPRSSSWFDPWGQGTQVTVSS

SEQ ID NO: 29638 - protein, 94 aa, Homo sapiens
ASGYTFTTYSMYWVRQAPGQSLQWMGWINAGNGDTRYSQKFQDRLTISRDTSANTASMQLSSLTSEDTAVYYCATSLAADFDYWGQGTLVTVSS

SEQ ID NO: 29639 - protein, 94 aa, Homo sapiens
ASGYTFSTYSMYWVRQAPGQRLEWMGWINAGNGDTRYSQKFQDRVTFTRDTSASTAYLELSTLRSEDTAVFYCATSLAADFDYWGQGTLVTVSS

SEQ ID NO: 29640 - protein, 103 aa, Homo sapiens
TVSGGSISSDSHYWGWIRQPPGKGLEWIANVYYSGATAYSSSLRRRVTISVHTSNNQFFLKLTSVTAADTALYFCARVMLTTSSMLPDAFDIWGQGTMVTVSS

SEQ ID NO: 29641 - protein, 103 aa, Homo sapiens
TVSGGSISSNSHYWGWIRQTPGKGLEWIANVYYSGATAYSPSLRSRATISVDTSNNQFFLKLTSVTAEDTTLYFCARVMLTTSSMLPDAFDIWGQGTMVTVSS

SEQ ID NO: 29642 - protein, 102 aa, Homo sapiens
VSGGSISSNSHYWGWIRQPPGKGLEWIANVYYSGATAYSPSLTGRVTISVDTSNNQFFLKLTSVTAADTALYFCARVMLTTSSMLPDAFDIWGQGTMLTVSS

SEQ ID NO: 29643 - protein, 106 aa, Homo sapiens
TVSGGPISDDDYYWGWVRQSTGKGLEWIGSIHHNGDTYKNPSLKSRVTLSVDTSKSHFSLSLDSVTAADTAIYYCARHGYPPCSGGPCSEKWFDPWGQGTLVTVSS

SEQ ID NO: 29644 - protein, 106 aa, Homo sapiens
TVSGGPISDDDYYWGWVRQSTGKGLEWIGSIHHNGDSYKNPSLKSRVTLSVDTSKSHFSLSLGSVTAADTAIYYCARHGYPPCSGGPCSEKWFDPWGQGTLVTVSS

SEQ ID NO: 29645 - protein, 99 aa, Homo sapiens
AASGFTFDEYVMHWVRQAPGTGLEWVSGISWNGDYIGYADSVKGRFMISRDNTKNSLYLQMNSLRGEDTALYFCVKDVRKYNYKMMDVWGKGTTVTVSS

SEQ ID NO: 29646 - protein, 99 aa, Homo sapiens
AASGFTFDEYVMHWVRQAPGKGLEWVSGISWNGDYIGYADSVKGRFMISRDNTKNSLYLQMNSLRGEDTALYFCVKDVRKYNYKMMDVWGKGTTVTVSS

SEQ ID NO: 29647 - protein, 99 aa, Homo sapiens
AASGFTFDEYVMHWVRQAPGKGLEWVSGISWNGDYIGYADSVKGRFMISRDNTKNSLYLQMNSLRGDDTALYFCVKDVRKYNYKMMDVWGKGTTVTVSS

SEQ ID NO: 29648 - protein, 99 aa, Homo sapiens
AASGFTFHEYVMHWVRQAPGKGLEWVSGISWNGDYIGYADSVKGRFMISRDNTKNSLYLQMNSLRGEDTALYFCVKDVRKYNYKMMDVWGKGTTVSVSS

SEQ ID NO: 29649 - protein, 99 aa, Homo sapiens
KGSGFDFSSHWIAWVRQMPGKGLEWMGIIYPGDSDTRYSPSFQGQVSISADKSISTAYLQWSRLKASDTAMYYCACVRRGVGKGWFDPWGQGTPVTVSS

SEQ ID NO: 29650 - protein, 98 aa, Homo sapiens
GFGYSFSNYWIAWVRQTPGKGLEWMGVIYPGDSDIRYNPSFQGQVTISADKSVSAAYLQWRSLKASDTAMYYCACVRRGVGKGWFDPWGQGTLVTVSS

SEQ ID NO: 29651 - protein, 96 aa, Homo sapiens
AASGFTFSTYDMHWVRQATGKGLEWVPGIGTADDTYYSGSVKGRFTISRENAKSSLYLQMNNLRAGDTAVYYCARESGGSYLLDYWGQGTLVTVSS

SEQ ID NO: 29652 - protein, 96 aa, Homo sapiens
AASGFTFSTYDMHWVRQATGKGLEWVSGIGTADDTYYSGSVKGRFTISRENAKSSLYLQMNNLRAGDTAVYYCARESGGSYLLDYWGQGTLVTVSS

SEQ ID NO: 29653 - protein, 99 aa, Homo sapiens
AASGFTFSSYGMSWVRQAPGKGLEWVISDSGASTYYADSVKGRFTVSRDNSKNTLYLQMNSLRAEDTAVYYCAKTGIAVAVTNWYFDLWGRGTLVTVSS

SEQ ID NO: 29654 - protein, 99 aa, Homo sapiens
AASGFTFSSYGMSWVRQAPGKGLEWVISDSGASTYYADSVKGRFTVSRDNSKNTLYLQMNSLRTEDTAVYYCAKTGIAVAVTNWYFDLWGRGTLVTVSS

SEQ ID NO: 29655 - protein, 96 aa, Homo sapiens
AASGFTFSSYNMNWVRQAPGKGLEWVSFISSINNYIYYADSVKGRFTISRDNAKNSLYLQMNSLRAEDTAVYYCVRDGGTYYFDSWGQGTLVTVSS

SEQ ID NO: 29656 - protein, 96 aa, Homo sapiens
AASGFNFSGYNMNWVRQAPGQGLEWLAFISNVNNYIYYADSVKGRFTISRDNAKNSLYLQMNSLRAEDTAVYYCVRDGGTYYFDSWGQGTLVTVSS

SEQ ID NO: 29657 - protein, 91 aa, Homo sapiens
SGFSFSDYYMIWVRQAPGKGLELISYITSSQTTYYADSVKGRFTISRDNAKNSLYLRMNSLRAEDTAVYYCVRDSYGVDYWGQGTLVTVSS

SEQ ID NO: 29658 - protein, 91 aa, Homo sapiens
SGFSFSEYYMIWIRQAPGKGLEWISYITSSLTTYYADSVKGRFTISRDNAKNSLYLQMNSLRVEDTAMYYCVRDSYGVDYWGQGTLVTVSS

SEQ ID NO: 29659 - protein, 91 aa, Homo sapiens; identical to SEQ ID NO: 29658

SEQ ID NO: 29660 - protein, 99 aa, Homo sapiens
GVSGASFTDSYFTWIRQPPGRGLEWIGDVFQGGSTNYNSSLKSRVSLSADTYMRQISLRMPSMTAADAAVYFCARGEVRLLGWSPLDSWSQGVLVTVSS

SEQ ID NO: 29661 - protein, 99 aa, Homo sapiens
GVSGASFTDSYFTWIRQPPGRGLEWIGDVFQGGATNYNSSLKSRVSLSADTYMRQVSLRMPSMTAADAAVYFCARGEVRLLGWSPLDSWSQGVLVTVSS

SEQ ID NO: 29662 - protein, 99 aa, Homo sapiens
GVSGASFTDSYFTWIRQPPGRGLEWIGDVFQGGATNYNSSLKSRVSLSSDTYMRQISLRMPSMTAADAAVYFCARGEVRLLGWSPLDSWSQGVLVTVSS

SEQ ID NO: 29663 - protein, 105 aa, Homo sapiens
TVSGGSISSSSHYWGWIRQPPGKGLEWIGTIYYSGSTSYNPSLKSRVTLSVDTSKNQFSLKLSSVAAADTAVYYCARRGSSSLYLPTISYYMDIWGKGTTVTVSS

SEQ ID NO: 29664 - protein, 105 aa, Homo sapiens
TVSGGSISSSSHYWGWIRQPPGKGLEWIGTIYYSGSTSYNPSLKSRVTISVDTSKNQFSLKLSSVAAADTAVYYCARRGSSSLYLPTISYYMDIWGKGTTVTVSS

SEQ ID NO: 29665 - protein, 93 aa, Homo sapiens
VGSGFNFGDYTMYWVRQRPGKGLEWVSTINWNGGTIGYSDSVKGRFTVSRDNANNSLYLLMNSLSPEDTAFYYCARGSRAPVWGPGTLVTVSS

SEQ ID NO: 29666 - protein, 93 aa, Homo sapiens
AASGFNFYDYSMYWVRQAPGKGLEWVATINWNGDNVGYSDSVKGRFTVSRDNANSSLHLLMNSLRPEDTAFYFCARGSRAPVWGRGTLVTVSS

SEQ ID NO: 29667 - protein, 97 aa, Homo sapiens
ASGYSFVNYYIAWVRQRPGKGLEWMGNIYPGDSETRYSPSFQGQVTFSVDRSTGTAYLHWSSLKASDTAIYYCARQFEVVQPSLNYWGLGTLVTVSS

SEQ ID NO: 29668 - protein, 97 aa, Homo sapiens
ASGYSFVNYYIAWVRQMPGKGLEWMGNIYPADSETRYSPSFQGQVTFSVDRSTGTAYLHWNSLKASDTAIYYCARQFEVVQPSLNYWGLGTPVTVSS

SEQ ID NO: 29669 - protein, 94 aa, Homo sapiens
AASEFTVSSNYMSWVRQAPGKGLEWVSVIYSGGSTYYADSVRGRLSISRDNSKNTLFLQMSSLKVEDTAVYFCVGARLGLPGYWGQGTLVIVSS

SEQ ID NO: 29670 - protein, 94 aa, Homo sapiens
AVSEFTVSSNYMSWVRQAPGKGLEWVSVIYSGGSTYYADSVRGRLTISRDNSKNTLFLQMSSLRVEDTAVYFCVGARLGLPGYWGQGTLVTVSS

SEQ ID NO: 29671 - protein, 93 aa, Homo sapiens
ASEFTVSNNYMSWVRQAPGKGLEWVSVIYSGGSTYYADSVRGRLTISRDTSKNTVFLQMSSLRVEDTAIYYCVGARLGLPGYWGQGTLVTVSS

SEQ ID NO: 29672 - protein, 94 aa, Homo sapiens
AASEFTVSGNYMSWVRQAPGKGLEWVSVIYSGGSTYYADSVRGRFTISRDNSKNTLFLQMSSLRVEDTAVYYCVGARLGLPGYWGQGTLVTVSS

SEQ ID NO: 29673 - protein, 99 aa, Homo sapiens
AASGFTFGNAWMHWVRQAPGKGLEWVGRIKTKRDGGATDYAPPVKGRFTISRDDSENTLYLQMNSLKTEDTAVYHCTTDQGGDVLTGSWGQGTLVTVSS

SEQ ID NO: 29674 - protein, 99 aa, Homo sapiens
AASGFTFSNAWMHWVRQAPGKGLEWVGRIKTKGERGATDYAPPVKGRFTISRDDSENTLYLQMNSLKTEDTAVYHCTTDQGGDVLTGSWGQGTLVTVSS

SEQ ID NO: 29675 - protein, 98 aa, Homo sapiens
VASGFTFRSYCMSWVRQAPGKGLEWVSAISESGRSTTHADSVRGRFTISRDNSKNILFLQMNSLTAEDTAIYYCAKTAQGYWRPHDSWGRGTLVTVSS

SEQ ID NO: 29676 - protein, 98 aa, Homo sapiens
AASGFTFRSYCMSWVRQAPGKGLEWVSAISESGRSTTHADSVRGRFTISRDNSKNTLFLQMNSLTAEDTAIYYCAKTAQGYWRPHDSWGQGTLVTVSS

SEQ ID NO: 29677 - protein, 98 aa, Homo sapiens
AASGFTFRSYCMSWVRQAPGKGLEWVSAISETGRSTTHADSVRGRFTISRDNSKNTLFLQMNSLTAEDTAIYYCAKTAQGYWRPHDSWGQGTLVTVSS

SEQ ID NO: 29678 - protein, 98 aa, Homo sapiens
VASGFTFRSYCMSWVRQAPGKGLEWVSAISESGRSTTHADSVRGRFTISRDNSKNILFLQMNSLTAEDTAIYYCAKTAQGYWRPHDSWGQGTLVTVSS

SEQ ID NO: 29679 - protein, 103 aa, Homo sapiens
TVSGGSINSTTYYWGWIRQPPGKGLEWVGSVYSSGISYYNPSLKSRVTISLDTSKNQFSLELTSVTAADTAVYSCARHNYPQRWLQSFYFDSWSQGTLVTVSS

SEQ ID NO: 29680 - protein, 103 aa, Homo sapiens
TVSGGSVNSTTYYWGWIRQSPGKGLEWIGSVYYTGSTYYNPSLKGRVSMSIDTSKNQFSLHLSSVTAADTAVYSCARHNYPQRWLQSFYFDSWGQGTLVTVSS

SEQ ID NO: 29681 - protein, 103 aa, Homo sapiens
TVSGGSVNSSTYYWAWVRQPPGKGLEWIGSVYSSGKSYYNPSLKSRVTISADTSKNQFSLKLLSVTAADTAVYSCARHNYPQRWLQSFYFDSWGQGNLVTVSS

SEQ ID NO: 29682 - protein, 103 aa, Homo sapiens
ASGDTYGSFAVTWVRQAPGQGLEWMGGIIPVVGSPNYAQKFQGRITITADESTTTAYLELSGLRSDDTAVYYCARAPFVSSQYAVYYYYMDVWGKGTTVTVSS

SEQ ID NO: 29683 - protein, 103 aa, Homo sapiens
ASGDTYGTFAITWVRQAPGQGLEWMGGIIPVVGSPNYARKFQGRVTITADESTTTSYMELTSLRSEDTAVYYCARAPFVSSQYAVYYYYMDVWGKGTTVTVSS

SEQ ID NO: 29684 - protein, 94 aa, Homo sapiens
SGFIFSRYEMNWVRQAPGKGLERVAFISHSDDNIVYAESVKGRFTISRDNTKNSLFLQMNSLRTEDTAVYYCARDNGRAAADEWGQGTLVTVSS

SEQ ID NO: 29685 - protein, 96 aa, Homo sapiens
VASGFALSPYEMNWVRQAPGKGLERVAFISHTDTTVLYGDSVRGRFTISRDNGKNSVYLQMYSLRVEDTAVYYCARDNGRAAADEWGQGTLVTVAS

SEQ ID NO: 29686 - protein, 101 aa, Homo sapiens
AASGFTFSSYSMNWVRQAPGKGLEWVSCISSGGDYIYYADSVKGRFTISRDNPRNSLSLQMSSLRAEDTAIYYCARGPYNWNDQRNWFDPWGQGTLVTVSS

SEQ ID NO: 29687 - protein, 101 aa, Homo sapiens
AASGFTFSSYSMNWVRQAPGKGLEWVSCISSGGDYIYYADSVKGRFTISRDNARNSLSLQMSSLRAEDTAVYYCARGPYNWNDQRNWFDPWGQGTLVTVSS

SEQ ID NO: 29688 - protein, 97 aa, Homo sapiens
AASGFTFSSHVMSWVRQAPGKGLEWVSVISGSGSGTYYADSVRGRFTISRDNSKDTVYLQMSSLRAEDTAVYYCARGPCTTCYSDFWGQGTLVTVSS

SEQ ID NO: 29689 - protein, 97 aa, Homo sapiens
AASGFTFSSHVMSWVRQAPGKGLEWVSVISGSGSGTYYADSVRGRFTISRDNSEDTLHLQMSSLTADDTAVYYCARGPCTTCYSDFWGQGTLVTVSS

SEQ ID NO: 29690 - protein, 102 aa, Homo sapiens
SDFTFSEYAMHWVRQAPGKGLQYVSTINNDGSSTFYTTSVKDRFTISRDNSKKTLYLQMGSLRVEDSAVYFCAREGEGDYHDSAGYDYMDVWGRGTTVIVSS

SEQ ID NO: 29691 - protein, 103 aa, Homo sapiens
ASEFTFSEYAMHWVRQAPGKGLQYVSTINNDGSSTFYTTSVKDRFTISRDNSKKTLYLQMGSLRVEDSAVYFCAREGEGDYHDSAGYDYMDVWGRGTTVIVSS

SEQ ID NO: 29692 - protein, 100 aa, Homo sapiens
AASGFSFASHFLHWVRQAPGQGLVWVSRINTGGSQTFYADSVKGRFTMSRDNAKNTLYLQMNSLRVDDAAIYYCAAEYPVGFGKVPLDYWGQGTLVTVAS

SEQ ID NO: 29693 - protein, 100 aa, Homo sapiens
AASGFTFRSHFMHWVRQAPGQGLVWVSRINTDGSQTFYADSVKGRFTMSRDNAKNTLYLQMNNLRADDAAIYYCAAEYPVGFGKVPLDYWGQGTLVTVAS

SEQ ID NO: 29694 - protein, 99 aa, Homo sapiens
AASRFTFSDYYMTWIRQAPGKGLEWIAYISSSSSYRKYADSVKGRFTISRDNAKNSLYLQMTSLRPEDTAMFYCARVGGRTYTDAFDIWGQGTMVTVSS

SEQ ID NO: 29695 - protein, 99 aa, Homo sapiens
AASGFTFSDYYMTWVRQAPGRGLEWISYISGSSDDRKHADSVKGRFAISRDNAKNSLYLQMTSLRPEDTAVYYCARVGGRTYTDAFDIWGQGTMVTVSS

SEQ ID NO: 29696 - protein, 96 aa, Homo sapiens
AASGFTLSNYWMTWVRQAPGKGLEWVANINEDGSAKTYVDSVKGRFTVSRDNVKKSLYLQMNSLRAEDTAVYYCANSPTSVDSDYWGQGTLVSVSS

SEQ ID NO: 29697 - protein, 96 aa, Homo sapiens
AASGFTFSNYWMTWVRQAPGKGLEWVANINQDGSAKTYVDSVKGRFTVSRDNVKKSLYLQMNSLRAEDTAVYYCANSPTSVDSDYWGQGTLVSVSS

SEQ ID NO: 29698 - protein, 96 aa, Homo sapiens
AASGFTFSNYWMTWVRQAPGKGLEWVANINEDGSAKTYVDSVKGRFTVSRDNVKKSLYLQMNSLRAEDTAVYYCANSPTSVDSDYWGQGTLVSVSS

SEQ ID NO: 29699 - protein, 96 aa, Homo sapiens; identical to SEQ ID NO: 29697

SEQ ID NO: 29700 - protein, 96 aa, Homo sapiens
VSGYSFTNYWIGWVRQMPGKGLEWMGIIYPRDSDTRYSPSFEGLVTISADKSITTAYLQWSNLKASDTAMYYCARTRIEGGYYFDRWGQGTLVTVS

SEQ ID NO: 29701 - protein, 98 aa, Homo sapiens
KVSGYSFTSYWIGWVRQMPGKGLEWMGITHPSDSDTRYSPSFEGQVTISADKSTRTAYLQWSNLKASDTAIYFCARTRIEGGYYFDRWGQGTLVTVSS

SEQ ID NO: 29702 - protein, 99 aa, Homo sapiens
VSGYSLTEVSLHWVRQAPGKGLEYMTGFDPRDGETVYSQNFHGRVDMTEDTVTETAYMVLSNLRSGDTAVYYCVTELDSSAMYPGGSYWGQGTQVTVSS

SEQ ID NO: 29703 - protein, 99 aa, Homo sapiens
VSGYSLTEVSLHWVRQAPGKGLEYMTGFDPRDGKTVYSQSFRGRVDMTEDTVTETAYMVLSNLRSGDTAVYYCVTELDSSAMYPGGSYWGQGTQVTVSS

SEQ ID NO: 29704 - protein, 103 aa, Homo sapiens
TVSGGSIRGSPYYWAWIRQPPGKGLEWIGSVPYSGSTYYNPSLKSRVTVSVDTSKNQFSLNLSSVTAADTAVYYCARQGYCSGGPCHRYFDPWGQGTLVTVSS

SEQ ID NO: 29705 - protein, 103 aa, Homo sapiens
TVSDSSIRGSPYYWAWIRQPPGKGLEWIGSVPFSGTTYYTPSLRSRATVSADTSKNQFSLTLSSVTAADTAVYYCARQGYCSGGPCHRYFDPWGQGILVTVSS

SEQ ID NO: 29706 - protein, 104 aa, Homo sapiens
ASGYTFTTYGISWVRQAPGQGLEWMGWIKPYNGNTEYTQKLQGRVTMTTDTSTSTAYMELRRLRSDDTAVYYCARDRPSYCSGTTCYPNDAFDVWGQGAMVTVS

SEQ ID NO: 29707 - protein, 104 aa, Homo sapiens; identical to SEQ ID NO: 29706

SEQ ID NO: 29708 - protein, 101 aa, Homo sapiens
AVSGGSFSGYYWTWIRQPPGRGLEWIGEINHTGDSNYNSSLESRVTISLDMSKNQVSLRLSSVTAADTAVYYCARARGGATGYYLYYFDYWGQGTLVTVSS

SEQ ID NO: 29709 - protein, 100 aa, Homo sapiens
VSGGSFSGYYWTWIRQPPGKGLEWIGEINHTGDANYNSSLERRVAISIDMSKNQVSLKLFSVSAADTAVYYCARARGGATGYYLYYFDYWGQGTVVTVSS

SEQ ID NO: 29710 - protein, 111 aa, Homo sapiens
TQTLTLTCTFSGFSLSTSGVGVGWLRQPPGQALECLALIYWDDDKRYRPSLRNRLTITKDTSKNQVVLTMTNMDPLDTATYYCAHRRVSGSPWDWGDFDFWGQGTVVTVSS

SEQ ID NO: 29711 - protein, 111 aa, Homo sapiens
TQTLTLTCTFSGFSLSTSGVGVGWLRQPPGQALECLALIYWDDDKRYRPSLRNRLTITKDTSRNQVVLTMTNMDPLDTATYYCAHRRVSGSPWDWGDFDFWGQGTVVTVSS

SEQ ID NO: 29712 - protein, 111 aa, Homo sapiens
TQTLTLTCTFSGFSLSTSGVGVGWLRQPPGQALECLALIYWDDDKRYRPSLRNRLTITKDTSKNQVVLTMTNMDPLDTGTYYCAHRRVSGSPWDWGDFDFWGQGTVVTVSS

SEQ ID NO: 29713 - protein, 111 aa, Homo sapiens
TQTLTLTCTFSGFSLSASGVGVGWIRQPPGQALECLAIIYWDDDKRYRPSLRSRLTITKDTSKNQVVLTMTNMDPLDTATYYCAHRRVSGSPWDWGDFDFWGQGTVVTVSS

SEQ ID NO: 29714 - protein, 111 aa, Homo sapiens
TQTLTLTCTFSGFSLSTSGVGVGWIRQPPGQALECLAVVYWDGDKRYRPSLRNRLTITKDTYKNQVVLTMTNMDPLDTATYYCAHRRVSGSPWDWGDFDFWGQGTVVTVSS

SEQ ID NO: 29715 - protein, 98 aa, Homo sapiens
TVFGGSISSDDYYWSWVRQHPGEGLEWIGYIYHSGETYYNPSLRSRLIISVDTSKNQFSLNLISVTAADTAVYYCARYRGRPVDFDYWGQGTLVTVSS

SEQ ID NO: 29716 - protein, 98 aa, Homo sapiens
TVFGGSISSDDYYWSWVRQHPGEGLEWIGYIYHSGETYYNPSLKSRLIISVDTSKNQFSLNLISVTAADTAVYYCARYRGRPVDFDYWGQGILVTVSS

SEQ ID NO: 29717 - protein, 101 aa, Homo sapiens
AASGFTVRSNYMSWVRQAPGKGLEWVSVISSGSNTYYADSVRGRFTISRDNSKNTLYLQMNSLRAEDTAVYYCARGNGVVSGWKSYYFDNWGQGTLVTVSS

SEQ ID NO: 29718 - protein, 101 aa, Homo sapiens
AASGFTVSSNYMSWVRQAPGKGLEWVSVIYSGGRTYSSDSVKGRFTISRDNSKNTLYLQMNSLRVEDTAVYYCARGNGVVSGWKSYYFDNWGQGTLVTVSS

SEQ ID NO: 29719 - protein, 100 aa, Homo sapiens
ASGYTFTAFYMHWVRQAPGQGLEWMGWINPNSGGTNYAQKFQGWVTMTRDTSISTAYMELSRLGSDDTAVYYCATDRYSSSPGRGAVDYWGQGTLVTVSS

SEQ ID NO: 29720 - protein, 100 aa, Homo sapiens
ASGYTFTAFYMHWVRQAPGQGLEWMGWINPNSGGTNYAQKFQGWVTMTRDTSVSTAYMELSSLGSDDTAVYYCATDRYSSSPGRGAVDYWGQGTLVTVSS

SEQ ID NO: 29721 - protein, 100 aa, Homo sapiens
ASGYTFTAFYMHWVRQAPGQGLEWMGWINPNSGGTNYAQKFQGWVTMTRDTSISTAYMELSSLGSDDTAVYYCATDRYSSSPGRGAVDYWGQGTLVTVSS

SEQ ID NO: 29722 - protein, 100 aa, Homo sapiens; identical to SEQ ID NO: 29720

SEQ ID NO: 29723 - protein, 100 aa, Homo sapiens
ASGYTFTAFYMHWVRQAPGQGLEWMGWINPNSGGTNYAQKFQGWVTMTRDTSMSAAYMELSRLGSDDTAVYYCATDRYSSSPGRGAVDYWGQGTLVTVSS

SEQ ID NO: 29724 - protein, 100 aa, Homo sapiens; identical to SEQ ID NO: 29719

SEQ ID NO: 29725 - protein, 103 aa, Homo sapiens
AASGFTFSNYWMHWVRQPPGKGLVWVSRININGSSTTYADSVKGRFSISRDNAMNTLYLQMNSLRAEDTAVYYCAKDFFPFCSGGNCFVEFDLWGQGTLVTVS

SEQ ID NO: 29726 - protein, 103 aa, Homo sapiens
AASGFTFSNYWMHWVRQPPGKGLVWVSRININGSSTTYADSVKGRFTISRDNAMNTLYLQMNSLRAEDTAVYYCAKDFFPFCSGGNCFVEFDLWGQGTLVTVS

SEQ ID NO: 29727 - protein, 98 aa, Homo sapiens
AASGFTFNNYWMTWVRQSPGKGLEWVANIKPDGSEKYYLDSVKGRFTISRDNAKSSLSLQMNSLRADDTAMYYCTKGGMSSSWFWVDWGQGTLVTVSS

SEQ ID NO: 29728 - protein, 98 aa, Homo sapiens
AASGFTFSNYWMTWVRQSPGKGLEWVANIKPDGSEKYYVDSVKGRFTISRDNAKNSLYLQMNSLRAEDTAMYYCTKGGMSSSWFWVDWGQGTLVTVSS

SEQ ID NO: 29729 - protein, 97 aa, Homo sapiens
AVSGDSVSSSDYWSWVRQPPGKGLEWIGQIRLPLTAYYNPSLQSRVTVSVDRSKNQLSLKLTSVTAADTAVYYCARHLSGPPSHDLWGQGTLVTVSS

SEQ ID NO: 29730 - protein, 97 aa, Homo sapiens
AVSGDSVSSSDYWSWVRQPPGKGLEWIGQIRLPLTAYYNPSLQSRVTVSVDRSKNQLSLRLTSVTAADTAVYYCARHLSGPPSHDLWGQGTLVTVSS

SEQ ID NO: 29731 - protein, 97 aa, Homo sapiens; identical to SEQ ID NO: 29730

SEQ ID NO: 29732 - protein, 97 aa, Homo sapiens
AVSGDSVSSSDYWSWVRQPPGKGLEWIGQIRLPSTAYYNPSLQSRVTVSVDRSKNQLSLMLTSVTAADTAVYYCARHLSGPPSHDLWGQGTLVTVSS

SEQ ID NO: 29733 - protein, 97 aa, Homo sapiens; identical to SEQ ID NO: 29730

SEQ ID NO: 29734 - protein, 97 aa, Homo sapiens
AVSGDSVRSSDYWSWVRQPPGKGLEWIGQIRLPLTAYYNPSLQSRVTVSVDRSKNQLSLRLTSVTAADTAVYYCARHLSGPPSHDLWGQGTLVTVSS

SEQ ID NO: 29735 - protein, 97 aa, Homo sapiens
AVSGGSISSSNWWTWVRQPPGKGLEWIGEIYHRGSTNYNPSLKSRVTISVDKSKNQFSLKLSSVTAADTAIYYCARRGTDSGWYRDWGQGSLVTVSS

SEQ ID NO: 29736 - protein, 97 aa, Homo sapiens; identical to SEQ ID NO: 29735

SEQ ID NO: 29737 - protein, 97 aa, Homo sapiens
AVSGGSISSSNWWTWVRQPPGKGLEWIGEIYHRGNTNYNPSLKSRVTISVDKSKTQFSLNLSSVTAADTAIYYCARRGTDSGWYRDWGQGSLVTVSS

SEQ ID NO: 29738 - protein, 100 aa, Homo sapiens
TVSGGSISSGGYYWSWIRQHPGKGLEWVGYIYYSGSTYYNPSLKSRVTISVDTSKNQFSLKLSSLTAADTAMYYCARNGGYDLGWYFDLWGRGTLVTVSS

SEQ ID NO: 29739 - protein, 99 aa, Homo sapiens
TVSGGSISSDGYYWSWIRQHPGKGLEWLGYIYYSGSTYYNPSLKSRLTISVDTSKNQFSLKMSSVTAADTAVYYCARNGGYDLGWYFDLWGRGSLVTVS

SEQ ID NO: 29740 - protein, 103 aa, Homo sapiens
AASGFRFSSYAMSWVRQAPGKGLEWVSTITKDGRNTYYADSVKGRFTISRDNSKDTLYLQMNSLRAEDTAVYYCAKEPNYVWGNYRYIPFDYWGQGALVTVSS

SEQ ID NO: 29741 - protein, 103 aa, Homo sapiens
AASGFSFSSYAMSWVRQAPGKGLEWVSTITKDGRSTYYADSVKGRFTISRDNSRNTLYLHMNSLRAEDTAVYYCAKEPNYVWGNYRYIPFDYWGQGALVTVSS

SEQ ID NO: 29742 - protein, 103 aa, Homo sapiens; identical to SEQ ID NO: 29741

SEQ ID NO: 29743 - protein, 103 aa, Homo sapiens
AASGFRFSSYAMSWVRQAPGKGLEWVSTITKDGRNTYYADSVKGRFTISRYNFKDTLYLQMNSLRAEDTAVYYCAKEPNYVWGNYRYIPFDYWGQGALVTVSS

SEQ ID NO: 29744 - protein, 97 aa, Homo sapiens
TVSGGSMSNYYWSWIRQPPGKGLEWIGYISYGGTTNYNPSLKSRVTISVDTSKNQFSLKLSSVTAADTAVYYCARQEGSGTTWIRVWGQGTLVTVSS

SEQ ID NO: 29745 - protein, 97 aa, Homo sapiens
TVSGGSMSTYYWSWIRQPPGKGLEWIGYIYYSGRTDYNPSLKSRLTLSVDTSKNQFSLKLRSVTAADTAIYYCARQEGSGTTWIRVWGQGTLVTVSS

SEQ ID NO: 29746 - protein, 96 aa, Homo sapiens
TVSGGSIPGYYWSWIRQSPGKGLEWIGFVYDSGSSHSNPSLGSRVTISLDKSKKQFTLELTSVTPADTAVYYCARTGSYYYYMDVWGEGTTVTVSS

SEQ ID NO: 29747 - protein, 96 aa, Homo sapiens
TVSGGSIPGYYWSWIRQSPGKGLEWIGFVYDSGSSHSNPSLESRVTISLDTSKKQFTLKLTSVTAADTAVYYCARTGSYYYYMDVWGKGTTVTVSS

SEQ ID NO: 29748 - protein, 96 aa, Homo sapiens; identical to SEQ ID NO: 29746

SEQ ID NO: 29749 - protein, 96 aa, Homo sapiens
TVSGGSISGYYWSWIRQTPGKGLEYIGHIYDTGSAFSSPSLESRVTISLDTSKKQFSLKLTSVTAADTAVYYCARTGSYYYYMDVWGKGTTVTVSS

SEQ ID NO: 29750 - protein, 96 aa, Homo sapiens
TVSGGSISGYYWSWIRQTPGKGLEWIGYVYDTGSAFSSPSLESRVSISLDTSKKQFSLKLRSVTAADTAVYYCARTGSYYYYMDVWGKGTTVTVSS

SEQ ID NO: 29751 - protein, 96 aa, Homo sapiens
TVSGGSIMGYYWSWIRQSPGKGLEWIGYIYDSGSDYSNPSLESRVTISLDRSKKQFSLKLSSVTAADTAVYYCARTGSYYYYMDVWGKGTTVTVSS

SEQ ID NO: 29752 - protein, 96 aa, Homo sapiens
TVSGGSISGYYWSWIRQPPGKGLEWIGYIYDSGSSYSNPSLESRVTISLDTSKKQFSLKLSSVTAADTAVYYCARTGSYYYYMDVWGKGTTVTVSS

SEQ ID NO: 29753 - protein, 96 aa, Homo sapiens
TVSGGSISGYYWSWIRQTPGKGLEWIGYIYDSGSTYSSPSLESRVTISLDTSKKQFSLKLRSVTAADTAVYYCARTGSYYYYMDVWGKGTTVTVSS

SEQ ID NO: 29754 - protein, 96 aa, Homo sapiens
TVSGGSISGYYWSWIRQTPGKGLEYIGHIYDTGSAFSSPSLESRVTISLDRSKKQFSLKLTSVTAADTAVYYCARTGSYYYYMDVWGKGTTVTVSS

SEQ ID NO: 29755 - protein, 96 aa, Homo sapiens
TVSGGSIDGYYWSWIRQTPGKGLEWVGYIYDSGSSYSSPSLESRVTISLDKSKKQFSLKLRSVTAADTAVYYCARTGSYYYYMDVWGKGTTVTVSS

SEQ ID NO: 29756 - protein, 96 aa, Homo sapiens
TVSGGSISGYYWSWIRQPPGKGLEWIGYVYDSGSSYSNPSLESRVTISLEKSKKQFSLKLSSVTAADTAIYYCARTGSYYYYMDVWGEGTTVTVSS

SEQ ID NO: 29757 - protein, 96 aa, Homo sapiens
TVSGGSISGYYWSWIRQTPGRGLEWVGYVYDTGSSFSSPSLESRVTISLDTSKKQFSLKLRSVTAADTAVYYCARTGSYYYYMDVWGKGTTVTVSS

SEQ ID NO: 29758 - protein, 96 aa, Homo sapiens
TVSGGSISGYYWSWIRQAPGKGLEYIGHIYDTGSAFSSPSLESRVTISLDRSKKQFSLKLTSVTAADTAVYYCARTGSYYYYMDVWGKGTTVTVSS

SEQ ID NO: 29759 - protein, 96 aa, Homo sapiens; identical to SEQ ID NO: 29747

SEQ ID NO: 29760 - protein, 96 aa, Homo sapiens; identical to SEQ ID NO: 29749

SEQ ID NO: 29761 - protein, 96 aa, Homo sapiens
TVSGGSISGYYWSWIRQTPGKGLEWIGYVYDTGSSFSSPSLESRVSISLDTSKKQFSLKLRSVTAADTAVYYCARTGSYYYYMDVWGKGTTVTVSS

SEQ ID NO: 29762 - protein, 95 aa, Homo sapiens
VSGGSMMGYYWSWIRQPPGKGLEWIGFVYDSGSSHSTPSLESRVTISLDKSKKQFSLRLSSVTAADTAVYYCARTGSYYYYMDVWGKGTTVTVSS

SEQ ID NO: 29763 - protein, 96 aa, Homo sapiens
TVSGGSISGYYWSWIRQAPGKGLEYIGHIYDTGSAFSSPSLESRVTISLDTSKKQFSLKLTSVTAADTAVYYCARTGSYYYYMDVWGKGTTVTVSS

SEQ ID NO: 29764 - protein, 96 aa, Homo sapiens
TVSGGAISGYYWSWIRQPPGKGLEWIGYVYDSGSSYSTPSLESRVTISLDKSKRQFSLKLSFVTAADTAVYYCARTGSYYYYMDVWGKGTTVTVSS

SEQ ID NO: 29765 - protein, 96 aa, Homo sapiens
IVSGGSISGYYWSWVRQPPGKGLEWIGYIYDTGSSYSNPSLESRVTISLDTSRKQFSLKLSSVTAADTAVYYCARTGSYYYYMDVWGKGTTVTVSS

SEQ ID NO: 29766 - protein, 96 aa, Homo sapiens; identical to SEQ ID NO: 29763

SEQ ID NO: 29767 - protein, 96 aa, Homo sapiens
TVSGGSISGYYWSWIRQPPGKGLEWIGFIYDSGSSFSDPSLESRVTISWDTSKKQFSLKLSSVTAADTAVYYCARTGSYYYYMDVWGNGTTVTVSS

SEQ ID NO: 29768 - protein, 96 aa, Homo sapiens
TVSGGSIGGYYWSWIRQTPGKGLEWIGYVYDTGSAYSSPSLESRVTISLDTSKKQFSLKLRSVTAADTAVYYCARTGSYYYYMDVWGKGTTVTVSS

SEQ ID NO: 29769 - protein, 96 aa, Homo sapiens
TVSGGSIPGYYWSWIRQSPGKGLEWIGFVYDSGSSHSTPSLESRVTISLDKSKKQFTLKLTSVTAADTAVYYCARTGSYYYYMDVWGKGTTVTVSS

SEQ ID NO: 29770 - protein, 96 aa, Homo sapiens
TISGGSIPGYYWSWIRQSPGKGLEWIGFVYDTGSSHSNPSLESRVTISLDTSKKQFTLKLTSVTAADTAVYYCARTGSYYYYMDVWGKGTTVTVSS

SEQ ID NO: 29771 - protein, 96 aa, Homo sapiens
TVSGGSISGYYWSWIRQTPGKGLEYIGHIYDTGSAFSSPSLESRVTISLDRSKKQFSLKLTSVTAADTAVYYCARTGSYYYYMDVWGKRDHGHRLL

SEQ ID NO: 29772 - protein, 95 aa, Homo sapiens
TVSGGSIPGYYWSWIRQSPGKGLEWIGFVYDSGSSHSNPSLESRVTISLDTSKKQFTLKLTSVTAADTAVYCARTGSYYYYMDVWGKGTTVTVSS

SEQ ID NO: 29773 - protein, 96 aa, Homo sapiens
TVSGGSIMGYYWSWIRQSPGKGLEWIGYIYDSGSDYSNPSLESRVTISLDRSKKQFSLKLSSVTAADTAVHYCARTGSYYYYMDVWGKGTTVTVSS

SEQ ID NO: 29774 - protein, 96 aa, Homo sapiens
TVSGGSISGYYWSWIRQTPGKGLEWIGYLYDTGSAFSSPSLESRVSISLDTSKKQFSLKLRSVTAADTAVYYCARTGSYYYYMDVWGKGTTVTVSS

SEQ ID NO: 29775 - protein, 96 aa, Homo sapiens; identical to SEQ ID NO: 29749

SEQ ID NO: 29776 - protein, 96 aa, Homo sapiens
TVSGGSINGYYWSWIRQPPGKGLEWLGYIYDSGSSYSNPSLESRVTISLDKSQKQFSLKLSSVTAADTAVYYCARTGSYYYYMDVWGKGTTVTVSS

SEQ ID NO: 29777 - protein, 96 aa, Homo sapiens
TVSGGSISGYYWSWIRQPPGKGLEYIGHIFDSGSSYSSPSLESRVTISLDKSKKQISLKLSSMTAADTAEYYCARTGSYYYYMDVWGKGTTVTVSS

SEQ ID NO: 29778 - protein, 96 aa, Homo sapiens
SVSGGSISGYYWSWIRQPPGKGLEWIGYVYDSGSSYSNPSLESRVTISLDTSKKQFSLKLSSVTAADTAVYYCARTGSYYYYMDVWGKGTTVTVSS

SEQ ID NO: 29779 - protein, 96 aa, Homo sapiens
TVSGGSISGYYWSWIRQAPGKGLEYIGHIYDTGSAFSSPSLESRVTISSDTSKKQFSLKLTSVTAADTAVYYCARTGSYYYYMDVWGKGTTVTVSS

SEQ ID NO: 29780 - protein, 96 aa, Homo sapiens
TVSGGSISGYYWSWIRQALGKGLEYIGHIYDTGSAFSSPSLESRVTISLDTSKKQFSLKLTSVTAADTAVYYCARTGSYYYYMDVWGKGTTVTVSS

SEQ ID NO: 29781 - protein, 96 aa, Homo sapiens
SVSGGSIPGYYWSWIRQPPGKGLEWIGFIYDSGSSFSNPSLESRVTISLDTSNKQFSLKLSSVTAADTAVYYCARTGSYYYYMDVWGNGTTVTVSS

SEQ ID NO: 29782 - protein, 96 aa, Homo sapiens; identical to SEQ ID NO: 29761

SEQ ID NO: 29783 - protein, 96 aa, Homo sapiens
TVSGGSISGYYWSWIRQPPGKGLEWIGEIYDTGSSYSNPSLESRVTISLDTSKKQFSLKLSSVDAADTAVYYCARTGSYYYYMDVWGKGTTVTVSS

SEQ ID NO: 29784 - protein, 96 aa, Homo sapiens
TVSGGSILGFYWSWIRQTPGKGLEWIGFIYDTGSAFSSPSLKSRVSISLDTSKKQFSLNLRSVTAADTAVYYCARTGSYYYYMDVWGKGTTVTVSS

SEQ ID NO: 29785 - protein, 96 aa, Homo sapiens; identical to SEQ ID NO: 29754

SEQ ID NO: 29786 - protein, 95 aa, Homo sapiens
TVSGGSISGYYWSWIRQTPGKGLEYIGHIYDTGSAFSSPSLESRVTISLDTSKKQFSLKLTSVTAADTAVYYCARTGSYYYYMDVWGKGPRSPSP

SEQ ID NO: 29787 - protein, 96 aa, Homo sapiens; identical to SEQ ID NO: 29761

SEQ ID NO: 29788 - protein, 96 aa, Homo sapiens
TVSGGSIMGCYWSWIRQSPGKGLEWIGYIYDSGSDYSNPSLESRVTISLDRSKKQFSLKLSSVTAADTAVYYCARTGSYYYYMDVWGKGTTVTVSS

SEQ ID NO: 29789 - protein, 96 aa, Homo sapiens; identical to SEQ ID NO: 29753

SEQ ID NO: 29790 - protein, 96 aa, Homo sapiens
TVSGGSIDGYYWSWIRQPPGKGLEWIGYVYDTGSSFSIPSLESRVTISLDKSRRQFSLKLSSVTVGDTAVYYCARTGSYYYYMDVWGKGTTVTVSS

SEQ ID NO: 29791 - protein, 96 aa, Homo sapiens; identical to SEQ ID NO: 29756

SEQ ID NO: 29792 - protein, 96 aa, Homo sapiens
TVSGGSISGYYWSWIRQTPGKGLEYIGHIYDTGSAFSSPSLESRVTISLDTPKKQFSLKLTSVTAADTAVYYCARTGSYYYYMDVWGKGTTVTVSS

SEQ ID NO: 29793 - protein, 96 aa, Homo sapiens
TVSGGSIRGYYWSWIRQTPGKGLEYVGHIYDTGSAFSSPSLESRVTISLDTSKKQFSLKLTSVTAADTAVYYCARTGSYYYYMDVWGKGTTVTVSS

SEQ ID NO: 29794 - protein, 96 aa, Homo sapiens
TVSGGSISGYYWSWIRQPPGKGLEWIGYIYDTGSSYSNPSLESRVTISFDTSRKHFSLKLSSVTAADTAVYYCARTGSYYYYMDVWGKGTTVTVSS

SEQ ID NO: 29795 - protein, 96 aa, Homo sapiens
TVSGGSIPGFYWSWIRQSPAKGLEWIGFVYDTGSSHYSPSLASRVTISLDTSKKQFTLKLTSVTAADTAVYYCARTGSYYYYMDVWGKGTTVTVSS

SEQ ID NO: 29796 - protein, 96 aa, Homo sapiens
TVSGGSISGYYWSWIRQPPGKGLEYIGHVYDSGSSYSNPSLESRVTISLDKSKKQISLKLSSMTAADTAEYYCARTGSYYYYMDVWGKGTTVTVSS

SEQ ID NO: 29797 - protein, 96 aa, Homo sapiens
TVSGGSISGYYWSWIRQPPGKGLEWIGFIYDSGSSFSDPSLESRVTISWDTSKKMFSLKLNSVTAADTAVYYCARTGSYYYYMDVWGNGTTVTVSS

SEQ ID NO: 29798 - protein, 107 aa, Homo sapiens
AASGFTLSTYGMHWVRQAPGKGPEWVAVIAYDGSNDHYAGSVKGRFTISRDNSRNTVYLQMNSLRAEDTAVYYCARGDNDYWSGHYTSYYYYYMDVWGTGTTVTVSS

SEQ ID NO: 29799 - protein, 107 aa, Homo sapiens
AASGFTLSSYGMHWVRQAPGKGPEWVAVIAYDGSKDHYADSVKGRFTISRDNSRNTVYLQMNSLRAEDTAVYYCARGDNDYWSGHYTSYYYYYMDVWGTGTTVTVSS

SEQ ID NO: 29800 - protein, 100 aa, Homo sapiens
AVSRFTFSNYAMDWVRQAPGKGLEWVAHIGPNGGGTYYADSVKGRFTISRDNSKNTLYLQMNSLRAEDTAVYYCAKVCYGNNRRLGFDSWGRGTLVTVSS

SEQ ID NO: 29801 - protein, 100 aa, Homo sapiens; identical to SEQ ID NO: 29800

SEQ ID NO: 29802 - protein, 101 aa, Homo sapiens
TVSGGPIWNSDFRWGWIRQPPGRGLEWIGTIWYNGDTYNNPSLKSRITMSVDTSRNHVSLKVFSVTAADTAVYYCARHIEAGAGWDWFDPWGQGIPVTVSS

SEQ ID NO: 29803 - protein, 101 aa, Homo sapiens
TVSGGPIWNSDFRWGWIRQPPGRGLEWIGTIWYNGDTYNNPSLKSRITMSVDTSRNHVSLKVFSVTAADTGVYYCARHIEAGAGWDWFDPWGQGIPVTVSS

SEQ ID NO: 29804 - protein, 101 aa, Homo sapiens; identical to SEQ ID NO: 29802

SEQ ID NO: 29805 - protein, 101 aa, Homo sapiens; identical to SEQ ID NO: 29803

SEQ ID NO: 29806 - protein, 101 aa, Homo sapiens
TVSGGPIWNSDFRWGWIRQPPGRGLEWIGTIWYNGDTYNNPSLKSRITMSVDTSRNQLSLKLYSVTAADTAVYFCARHIEAGAGWDWFDPWGQGTPVTVSS

SEQ ID NO: 29807 - protein, 93 aa, Homo sapiens
AASGFRFSDFWMNWVRQAPGKGLQWVANIKDDGSEKYYADSLKGRFTISRDNAKNSLYLQLNSLRAEDTALYYCFYGHYSDRWGQGTLVTVSS

SEQ ID NO: 29808 - protein, 93 aa, Homo sapiens
AASGFRFSDFWMNWVRQAPGKGLEWVANIKDDGSEKYYADSLKGRFTISRDNAKNSLYLQLNSLRAEDTALYYCFYGHYSDRWGQGTLVTVSS

SEQ ID NO: 29809 - protein, 92 aa, Homo sapiens
ASGLRFSDFWMNWVRQAPGKGLEWVANINGDGSQENYANFVKGRFTISRDNARTSLYLHLTSLRVEDTAVYYCFYGHYSDRWGPGTLLTVSS

SEQ ID NO: 29810 - protein, 92 aa, Homo sapiens; identical to SEQ ID NO: 29809

SEQ ID NO: 29811 - protein, 93 aa, Homo sapiens; identical to SEQ ID NO: 29807

SEQ ID NO: 29812 - protein, 92 aa, Homo sapiens
ASGLRFSDFWMNWVRQAPGKGLEWVANIKGDGSQENYANFVKGRFTISRDNARTSLYLHLTSLRVEDTAVYYCFYGHYSDRWGPGTLLTVSS

SEQ ID NO: 29813 - protein, 92 aa, Homo sapiens
ASGLRFSDFWMNWVRQAPGKGLEWVANINGDGSQENYANFVKGRFTVSRDNARTSLYLHLTSLRVEDTAVYYCFYGHYSDRWGPGTLLTVSS

SEQ ID NO: 29814 - protein, 92 aa, Homo sapiens
AASGFTFSNYLLTWVRQAPGKGLEWVSDISGSGATTYYADSVKGRFTISRDNSKNTLYLQMNSLRVEDTALYYCAKRLSGDWGQGALVTVSS

SEQ ID NO: 29815 - protein, 92 aa, Homo sapiens
AASGFTFSNYLLTWVRQAPGKGLEWVSDISGSGTTTYYADSVKGRFTISRDNSKNTLYLQMNSLRVEDTALYYCAKRLSGDWGQGALVTVSS

SEQ ID NO: 29816 - protein, 102 aa, Homo sapiens
AASGFTFSDSYMSWIRQAPGKGLEWVSYISSSGSYPNYADSVKGRFTISRDNAKNSLDLQMNSLRAEDTAVYYCAREGTIFGVVTTGAFDIWGQGTMVTVSS

SEQ ID NO: 29817 - protein, 102 aa, Homo sapiens
AASGFTFSDSYMSWIRQAPGKGLEWVSYISSSGSYPNYADSVKGRFTISRDNAKNSLNLHMNSLRAEDTAVYYCAREGTIFGVVTTGAFDIWGQGTMVTVSS

SEQ ID NO: 29818 - protein, 94 aa, Homo sapiens
AVSVDSISRYWWGWVRQPPGKGLEWLGEIYESVSANYNPSLKSRVSISIDKTKNQFSLNLSSVTAADTAMYYCVASRNWALENWGQGTLVTVSS

SEQ ID NO: 29819 - protein, 94 aa, Homo sapiens
GVSVDSISRYWWAWVRQPPGKGLEWLGEIYESGSANYNPSLKSRVSISIDKTKNQFSLNLRSVTAADTAMYYCVASRNWALENWGQGTLVTVSS

SEQ ID NO: 29820 - protein, 97 aa, Homo sapiens
KGSEYSFTSEWISWVRQLPGKGLEWMGRIDPGDSHINYSPSLEGHVTISADKSINTAYLQWSSLKASDTAMYYCARHTFSSGSCDYWGQGTLVTVSS

SEQ ID NO: 29821 - protein, 97 aa, Homo sapiens
KGSGYSFTNEWISWVRQLPDKGLEWMGRIDPGESHINYSPSLEGHVTISADKSMNTVYLHWNSLRASDTAMYYCARHTFSSGSCDYWGQGTLVTVAS

SEQ ID NO: 29822 - protein, 97 aa, Homo sapiens
AASGFTFRSYEMNWVRQAPGKGLEWVSFIGTSGYVKGYADSVKGRFAISRDNAKNSLYLQMNNLRVEDTAVYYCATDVPGALDFDDWGQGIVVTVSS

SEQ ID NO: 29823 - protein, 96 aa, Homo sapiens
AASGFTFRNYEMNWVRQAPGKGLEWVSFIGTGGYVKGYADSVKGRFAISRDNAKNSLYLQMNNLRVEDTAVYYCATDVPGALDFDDWGQGILVTVS

SEQ ID NO: 29824 - protein, 96 aa, Homo sapiens
AASGFTFRNYEMNWVRQAPGKGLEWVSFIGTGGYVKGYADSVKGRFAVSRDNAKNSLYLQMNNLRVEDTAVYYCATDVPGALDFDDWGQGILVTVS

SEQ ID NO: 29825 - protein, 97 aa, Homo sapiens
GSGYNFISYSISWVRQMPGKGLEWMGRIDPSDSYTNYSPSFQGHVTISADRSISTAYLQWSSLKASDTAMYYCARPYDSSGHYYMFWGQGTLVTVSS

SEQ ID NO: 29826 - protein, 97 aa, Homo sapiens
GSGYNFISYSISWVRQMPGKGLEWMGRIDPSDSYINYGPSFQGHVTISADRSISTAYLQWSSLKASDTAMYYCARPYDSSGHYYMFWGQGTLVTVSS

SEQ ID NO: 29827 - protein, 97 aa, Homo sapiens
GSGYNFISYSISWVRQMPGKGLEWMGRVDPSDSYTNYSPSFQGHVTISADRSISTAYLQWSSLKASDTAMYYCARPYDSSGHYYMFWGQGTLVTVSS

SEQ ID NO: 29828 - protein, 97 aa, Homo sapiens; identical to SEQ ID NO: 29826

SEQ ID NO: 29829 - protein, 110 aa, Homo sapiens
KDSGYRFTTDWIGWVRQMPGKGLEWMGIIYPGDSDTRYSPSFQGQVTISADKSISTAYLQWSSLKASDTAMYFCARVRTGIGIAAGGTPGQYYYYYMDVWGKGTTVTVSS

SEQ ID NO: 29830 - protein, 110 aa, Homo sapiens
KGSGDRFTTDWIGWVRQMPGKGLEWMGIIYPGDSDTRYSPSFQGQVTISADKSISTAYLQWSSLKASDTAMYYCARVRTGIGIAAGGTPGQYYYYYMDVWGKGTTVTVSS

SEQ ID NO: 29831 - protein, 102 aa, Homo sapiens
TVSGGSIYSVSHCLGWVRQPPGKGPEWIGSIYNSADAYYNPSLKGRLTLSVDTSKKQFSLSLTSVTAADTALYYCATIALTGEGGRGWFDSWGLGTLVTVSS

SEQ ID NO: 29832 - protein, 102 aa, Homo sapiens
TVSGGSISSVSHCLGWVRQPPGKGLEWIGSIYNSGDTYYNPSLKSRVTMSVDTSKKQFSLRLTSVTAADTALYYCATIALTGEGGRGWFDSWGLGTLVTVSS

SEQ ID NO: 29833 - protein, 102 aa, Homo sapiens
TVSGGSISSVSHCLGWVRQPPGKGLEWIGSIYNSGNTYYNPSLKSRVTMSVDTSKKQFSLRLTSVTAADTALYYCATIALTGEGGRGWFDSWGLGTLVTVSS

SEQ ID NO: 29834 - protein, 103 aa, Homo sapiens
AASAFTFSSYSMNWVRQAPGKGLEWVSSISGSSSYIYYADSVKGRFTISRDNARNSLYLQMNSLRAEDTAVYYCARVGSESYYTPYYYYYMDVWGKGTTVTVS

SEQ ID NO: 29835 - protein, 103 aa, Homo sapiens
AASAFTFSSYSMNWVRQAPGKGLEWVSSISSSSSYIYYADSVKGRFTISRDNARNSLYLQMNSLRAEDTAVYYCARVGSESYYTPYYYYYMDVWGKGTTVTVS

SEQ ID NO: 29836 - protein, 103 aa, Homo sapiens
AASAFTFSSYSMNWVRQAPGKGLEWVSSISSSSSYIYYADSVKGRFTISRDNARNSLYLQMNSLRAEDTAVYYCARVGSESYYTPYYYYYMDVWAKGPRSPSP

SEQ ID NO: 29837 - protein, 95 aa, Homo sapiens
SGYTFTSYGISWVRQAPGQGLEWMGWISAYNSNTKYAQKFQGRVTMTTDTSTSTAYMELRSLRSDDTAVYYCARETDIVATNDYWGQGALVTVSS

SEQ ID NO: 29838 - protein, 95 aa, Homo sapiens
SGYTFTSYGISWVRQAPGQGLEWMGWISAYNSNTKYAQKFQGRVTMTTDTSTSTAYMELRSLRSDDTAVYYCARETDIVATNDYWGQGTLVTVSS

SEQ ID NO: 29839 - protein, 99 aa, Homo sapiens
AASGFSFSNYGIHWVRQAPGKGLEWVALIWFDGSNKYYADSVKGRFTISRDNSRSTLYLQMNNLRAEDTAVYYCARDRGSGSYEYMDVWGKGTTVSVSS

SEQ ID NO: 29840 - protein, 99 aa, Homo sapiens
AASGFTFSNYGIHWVRQAPGKGLEWVALIWFDGSNKYYADSVKGRFTISRDNSRSTLYLQMNNLRAEDTAVYYCARDRGSGSYEYMDVWGKGTTVSVSS

SEQ ID NO: 29841 - protein, 99 aa, Homo sapiens; identical to SEQ ID NO: 29839

SEQ ID NO: 29842 - protein, 98 aa, Homo sapiens
ASGFTFSNYGIHWVRQAPGKGLEWVALIWFDGSNKYYADSVKGRFTISRDNSRSTLYLQMNNLRAEDTAVYYCARDRGSGSYEYMDVWGKGTTVSVSS

SEQ ID NO: 29843 - protein, 99 aa, Homo sapiens; identical to SEQ ID NO: 29840

SEQ ID NO: 29844 - protein, 96 aa, Homo sapiens
AASGFPFSSYVMHWVRQGPGDGLLWVARLSHDGSVPIYADSVKGRFTISRDNARNTLYLQMNSLSAEDTAIYYCVRDDGSWGLDYWGQGTLVTVSS

SEQ ID NO: 29845 - protein, 96 aa, Homo sapiens
AASGFPFSSYVMHWVRQGPGDGLLWVARLSHDGAVPIYADSVKGRFTISRDNARNTLYLQMNSLSAEDTAIYYCVRDDGSWGLDYWGQGTLVTVSS

SEQ ID NO: 29846 - protein, 96 aa, Homo sapiens; identical to SEQ ID NO: 29845

SEQ ID NO: 29847 - protein, 99 aa, Homo sapiens
IVSGGSISSSNYYWGWIRQPPGKGLEWIGSIYYSGSTYYSPSLKSRVTMSVDTSKNQFSLKLSSVTAADTAVYYCARHSTVTSFPILVWGQGTLVTVSS

SEQ ID NO: 29848 - protein, 99 aa, Homo sapiens; identical to SEQ ID NO: 29847

SEQ ID NO: 29849 - protein, 99 aa, Homo sapiens
TVSGGSISSSNYYWGWIRQPPGKGLEWIGSIYYSRSTYYSPSLQSRVTISVDTSKSQFSLKLSSVTAADTAVYYCARHSTVTSFPILVWGQGTRVAVSS

SEQ ID NO: 29850 - protein, 99 aa, Homo sapiens
TVSGGSISSSNYYWGWIRQPPGKGLEWIGSIYYSGNTYYSPSLKSRVTMSVDTSKNQFSLKLRSVTAADTALYFCARHSTVTSFPILVWGQGALVTVSS

SEQ ID NO: 29851 - protein, 103 aa, Homo sapiens
TSGFTFNSFDVNWVRQAPGRGLEWVSYTKTGGARVDYADSVKGRFTISRDNAKSSVDLQMHSLRAEDTAVYYCVRSRLFSDTRGYPHLGLDFWGQGTLVTVSS

SEQ ID NO: 29852 - protein, 103 aa, Homo sapiens
TSGFTFNSFDVNWVRQAPGKGLEWVSYTKTGGGRVDYADSVKGRFTISRDNAKSSVDLQMHSLKAEDTAVYYCVRSRLFSDTRGYPHLGLDFWGQGTLVTVSS

SEQ ID NO: 29853 - protein, 94 aa, Homo sapiens
VVSGGSIGSPYWWSWVRQAPGKGLEWIGKTHHNGSSNYNPSLKSRVSMSVEKSNNQFSLKLSSVSAADTGVYYCARDHGESGYWGQGTLVTVSS

SEQ ID NO: 29854 - protein, 94 aa, Homo sapiens
VVSGGSIGRPYWWSWVRQPPGKGLEWIGEIHHNGSTNYNPSLKSRVTISVDKSNNQFFLKLSSVSAADTAVYYCARDHGESGYWGQGTLVTVSS

SEQ ID NO: 29855 - protein, 94 aa, Homo sapiens
VVSGGSISRPYWWSWIRQTPGKGLEWIGEIHHNGSTNYNPSLKSRVTISVDKSKNEFSLKVSSVTGADTGVYYCARDHGESGYWGQGSLVTVSS

SEQ ID NO: 29856 - protein, 97 aa, Homo sapiens
AASGFTLSTYWMVWVRQAPGKGLEWVANIKQDGSEKYYVDSVQGRFTISRDNAKNSLYLQMSSLRAEDTAVYYCARDSDSGWSLSHWGQGTLVTVSS

SEQ ID NO: 29857 - protein, 97 aa, Homo sapiens
AASGFTLSTYWMVWVRQAPGKGLEWVANIKQDGTEKYYVDSVQGRFTISRDNAKNSLYLQMNSLRAEDTAVYYCARDSDSGWSLSHWGQGTLVTVSS

SEQ ID NO: 29858 - protein, 101 aa, Homo sapiens
GYGYKFPNYWIGWVRQRPGKGLEWMGIVYPDDSDTRYAPSFRGQVTVSADKSTNTAYLQWASLRASDSGIYYCVRHDKIQAVAGLRGVDFWGQGTLVNVSS

SEQ ID NO: 29859 - protein, 101 aa, Homo sapiens
GSGYKFPNYWIGWVRQRPGKGLEWMGIVYPDDSDTRYAPSFRGQVTISADKSINTAYLQWPSLKASDTAIYYCVRHDKIQAVAGLRGVDFWGQGTQVTVSS

SEQ ID NO: 29860 - protein, 104 aa, Homo sapiens
VVSGFTFSDYYMIWIRQAPGKGLEWVSYISPTGSTTSYADSVKGRFTISRDNAKNSLYLQMNSLRAEDTALYFCARDGNTGIFSRSYYYYLDVWGKGTTVTVSS

SEQ ID NO: 29861 - protein, 104 aa, Homo sapiens; identical to SEQ ID NO: 29860

SEQ ID NO: 29862 - protein, 104 aa, Homo sapiens
VVSGFTFNDYYMIWIRQAPGKGLEWVSYISPTGSTTSYADSVKGRFTISRDNAKNSLYLQMNSLRAEDTAVYFCARDGNTGIFSRSYYYYLDVWGQGTTVTVSS

SEQ ID NO: 29863 - protein, 104 aa, Homo sapiens
VVSGFTFSDYYMIWIRQAPGKGLEWVSYISPTGSTTSYADSVKGRFTVSRDTAKNSLYLQMNSLRAEDTALYYCARDGNTGIFSRSYYYYLDVWGKGTTVTVSS

SEQ ID NO: 29864 - protein, 95 aa, Homo sapiens
ASAFTLGDYWMAWVRQAPGKGLEWVANIHQDGNQRYYADSVKGRFTISRDNPNNSLFLEMKFVGAEDTALYSCARGGRTGTFDVWGQGAMVTVSS

SEQ ID NO: 29865 - protein, 95 aa, Homo sapiens
ASAFTLGDYWMAWVRQAPGKGLEWVANIKQDGSEKYYVDSVKGRFTISRDNSNNSLFLEMKFVGAEDTALYYCARGGRTGTFDVWGQGAMVTVSS

SEQ ID NO: 29866 - protein, 102 aa, Homo sapiens
AASGFTFSNYGMHWVRQVPGWGLEWVAIISYDGGSKYYADSVQGRFTISRDNSKNTLYLQMNSLRADDTAVYYCAKDRAYCSGGRCYDTDYWGQGTLVTVSS

SEQ ID NO: 29867 - protein, 102 aa, Homo sapiens
AASGFTFSNYGMHWVRQVPGWGLEWVAIISYDGGSKYYTDSVQGRFTISRDNSKNTVYLQMSGLTADDTAVYYCAKDRAYCSGGRCYDTDYWGQGTLVTVSS

SEQ ID NO: 29868 - protein, 102 aa, Homo sapiens
AASGFTFSNYGMHWVRQVPGWGLEWVAIISYDGGSKYYADSVQGRFTISRDNSKNTLYLQMNSLRAEDTAVYYCAKDRAYCSGGRCYDTDYWGQGTLVTVSS

SEQ ID NO: 29869 - protein, 102 aa, Homo sapiens; identical to SEQ ID NO: 29868

SEQ ID NO: 29870 - protein, 100 aa, Homo sapiens
ATSGFTFSSYAMAWVRQPPGKGLEWVSTMSGSGGSTYYADSVKGRFTTSRDNSRNTVYLHMNSLRAEDTAVYYCAKDYNYDSSGWLFDSWGQGTQVTVSS

SEQ ID NO: 29871 - protein, 100 aa, Homo sapiens
ATSGFTFSSYAMAWVRQPPGKGLEWVSTMSGSGGSTYYADSVKGRFTISRDNSRNTVYLHMNSLRAEDTAVYYCAKDYNYDSSGWLFDSWGQGTQVTVSS

SEQ ID NO: 29872 - protein, 100 aa, Homo sapiens; identical to SEQ ID NO: 29871

SEQ ID NO: 29873 - protein, 100 aa, Homo sapiens
ATSGFTFSTYAMAWVRQPPGKGLEWVSTMSGSGGSTYYADSVRGRFTISRDTSRNTVYLHMNSLRAEDTAVYYCAKDYNYDSSGWLFDSWGQGTQVTVSS

SEQ ID NO: 29874 - protein, 102 aa, Homo sapiens
AASGFNFRSYSMSWVRQAPGKGLEWVSLISGGGEKIHQRDSVKGRFIISRDNTKNTLYLQMNSLRDEDTAIYYCAKEATFCGGGCLSLNDYWGPGTLVTVSS

SEQ ID NO: 29875 - protein, 102 aa, Homo sapiens
AASGFNFRSYSMSWVRQAPGKGLEWVSLISGGGETIHQRDSVKGRFIISRDNTKNTLYLQMNSLRNEDTAIYYCAKEATFCGGGCLSLNDYWGPGTLVTVSS

SEQ ID NO: 29876 - protein, 102 aa, Homo sapiens
AASGFNFRSYSMSWVRQAPGKGLEWVSLINGRGEIIHQRDSVKGRFIISRDNTKNTLYLQMNSLRDEDTAIYYCAKEATFCGGGCLSLNDYWGPGTLVTVSS

SEQ ID NO: 29877 - protein, 96 aa, Homo sapiens
TSGFIFGDYTMSWFRQAPGKGLEWVGFIRGKAFGGTIQYAASVRGRFTVSRDDSKSIAFLQMDSLKTEDTALYYCTRGYVDLGDFWGRGTLVTVSS

SEQ ID NO: 29878 - protein, 96 aa, Homo sapiens
TSGFTFGDYTMSWFRQAPGKGLEWVGFIRGKAVGGTIQYAASVRGRFTVSRDDSKSIAFLQMDSLKTEDTALYYCTRGYVDLGDFWGRGTLVTVSS

SEQ ID NO: 29879 - protein, 101 aa, Homo sapiens
AASGFTFSTYAMSWVRQAPGKGLEWVSSIIQSGSNTFYADSVKGRFTISRDNSKSTLYLQMNSLRAEDTAVYYCAKDHLTRNNVWDDFDIWGQGTMVTVSS

SEQ ID NO: 29880 - protein, 101 aa, Homo sapiens; identical to SEQ ID NO: 29879

SEQ ID NO: 29881 - protein, 99 aa, Homo sapiens
VASGFSFKTYAMHWVRQAPGKGLEWLAVMSYEGSNRFYADSVKGRFIISRDNSINTLYLQMNSLRDEDTAVYFCASLTEYGGSLYVDVWGKGTTVTVSS

SEQ ID NO: 29882 - protein, 99 aa, Homo sapiens
VASGFSFKTYAMHWVRQAPGKGLEWLAVMSYEGSNRFYADSVKGRFIISRDNSINTLYLQMNSLRDEDTAVYFCASLTEYGGSLYVDVWGKGTMVTVSS

SEQ ID NO: 29883 - protein, 98 aa, Homo sapiens
AASGFTFSSYDMHWVRQVTGKGLEWVSAIGTAGDTYYPGSVKGRFTISRENAKNSLFLQMNSLRAGDTAVYYCARYYGSGSYSWFDPWGQGTLVTVSS

SEQ ID NO: 29884 - protein, 98 aa, Homo sapiens
AASGFTFSSYDMHWVRQATGKGLEWVSAIGTAGDTYYPGSVKGRFTISRENAKNSLFLQMNSLRAGDTAVYYCARYYGSGSYSWFDPWGQGTLVTVSS

SEQ ID NO: 29885 - protein, 103 aa, Homo sapiens
AGSGFTFSGYAVSWVRQAPGKGLEWVSAITGDGSTTWYADSVKGRFTISRDNSKNTLYLQMSSLRVEDTAVYYCAKDHGRDGHSSRAREFDYWGQGTLVTVSS

SEQ ID NO: 29886 - protein, 103 aa, Homo sapiens
AGSGIIFGNYAMSWVRQAPGKGLEWVSAITGGGDTTWYADSVKGRFTISRDNSKNMLYLQMNSLRVEDTAVYYCAKDHGRDGHSSRAREFDYWGQGTLVTVSS

SEQ ID NO: 29887 - protein, 103 aa, Homo sapiens
ATYGLTFSSYAMSWVRQAPGKGLEWVSGITGGGDTTWHADSVKGRFTTSRDNSKSTLYLQMNSLRVEDTAVYFCAKDHGRDGHSSRAREFDYWGQGTLVTVSS

SEQ ID NO: 29888 - protein, 103 aa, Homo sapiens
AASGFTFSSYAMAWVRQAPGKGLEWVSGISGSGDNTWDADSVKGRFTISRDNSKNTLYLQMSSLRAEDTAVYFCAKDHGRDGHSSRAREFDYWGQGTLVTVSS

SEQ ID NO: 29889 - protein, 103 aa, Homo sapiens
AGSGFTFSDYALSWVRQAPGKGLEWVSGITGDGSTTWYADSVKGRFTMSRDNSKNTLYLQMSSLRVEDTAVYYCAKDHGRDGHSSRAREFDYWGQGTLVTVSS

SEQ ID NO: 29890 - protein, 103 aa, Homo sapiens
AGSGFTFSSYAMSWVRQAPGKGLEWVSAITGGGDTTWYADSVKGRFTISRDNSKNTLYLQMNSLRVEDTAVYYCAKDHGRDGHSSRAREFDYWGQGTLVTVSS

SEQ ID NO: 29891 - protein, 104 aa, Homo sapiens
AASGFPFSSYAMSWVRQAPGRGLEWVSSLGHDGGNTYYAESVKGRFTISRDNSRNTLYLEMNSLSADDTAKYYCAQSLGDRCDSDGCRYYFANWGQGTLVTVSS

SEQ ID NO: 29892 - protein, 104 aa, Homo sapiens
AASGFPFRSYVMSWVRQTPGMGLEWVSSLSGNGGNAFYADSVKGRFTISRDNSRNTVYLEMNSLRADDSAKYYCAQSLGDRCDSDGCRYYFANWGQGTLVTVSS

SEQ ID NO: 29893 - protein, 104 aa, Homo sapiens
AASGFPFRSYVMSWVRQTPGMGLEWVSSLSGNGGNAFYADSVKGRFTISRDNSRNTVYLQMNSLRADDSAKYYCAQSLGDRCDSDGCRYYFANWGQGTLVTVSS

SEQ ID NO: 29894 - protein, 104 aa, Homo sapiens; identical to SEQ ID NO: 29892

SEQ ID NO: 29895 - protein, 99 aa, Homo sapiens
AASGSTFNNNALTWVRQAPGRGLEWVSSITGNGEYTYYADSVEGRFTISRENSNNTVYLQMNSLRVEDTAIYYCAAHTSPWYSGWFDPWGQGTLVTVSS

SEQ ID NO: 29896 - protein, 99 aa, Homo sapiens
AASGSTFKNNAITWVRQAPGRGLEWVASITGNGDYTYYADSLKGRVTISRDNSKNTIFLQMNSLRVEDTAMYYCAAHTSPWYSGWFDPWGQGTPVTVSS

SEQ ID NO: 29897 - protein, 99 aa, Homo sapiens
GASGFTFNSYEFNWVRQAPGKGLEWVSYISASGDLIYYADSVRGRFTVSRDNTKDSLFLQMNSLRPEDTAVYYCAREALHCGGDCLDYWGLGTLVTVSS

SEQ ID NO: 29898 - protein, 99 aa, Homo sapiens
AASGFTLTSYEMNWVRQAPGKGLEWVSFINERGDSIKYADSVRGRFTLSRDNAKDSLFLQMNSLRPEDTAVYYCAREALHCGGDCLDYWGQGTLVTVSS

SEQ ID NO: 29899 - protein, 102 aa, Homo sapiens
TVSGGSLNKYYWTWLRQSPGKGLEWIGYIYYRGATNYNPSLKSRVTMSVDTPNNQFSLRLTSVTAADTARYFCARQSRAYCGADCPSPFDHWGQGALVTVSS

SEQ ID NO: 29900 - protein, 102 aa, Homo sapiens
TVSGGSLNKYHWTWLRQSPGKGLEWIGYIYYRGATNYNPSLKSRVSMSLDTPNNQFSLRLTSVTSADTARYFCARQSRAYCGADCPSPFDHWGQGALVTVSS

SEQ ID NO: 29901 - protein, 102 aa, Homo sapiens
TVSGGSLNKYYWTWLRQSPGKGLEWIGYIYYRGATNYNPSLKSRVSMSLDTPNNQFSLRLTSVTSADTARYFCARQSRAYCGADCPSPFDHWGQGALVTVSS

SEQ ID NO: 29902 - protein, 102 aa, Homo sapiens
TVSGGSLNKNYWTWLRQSPGKGLEWIGYIYYRGATNYNPSLKSRVSMSIDTPNNQFSLRLTSVTSADTARYFCARQSRAYCGADCPSPFDHWGQGALVTVSS

SEQ ID NO: 29903 - protein, 94 aa, Homo sapiens
EASAFPFSRWGMHWVRQAPGKGLEWVAVIWYDGSQRYFGDSVKGRFTISRDNSKNTLYLQMTSLRVEDTAVYYCARGDNAFDIWGQGTMVTVSS

SEQ ID NO: 29904 - protein, 94 aa, Homo sapiens
EASGFPFSRWGMHWVRQAPGKGLEWVAVIWYDGSQRYFADSVRGRFTISRDNSNNTLYLQMTSLRVEDTAVYYCARGDNAFDIWGQGTLVTVSS

SEQ ID NO: 29905 - protein, 94 aa, Homo sapiens; identical to SEQ ID NO: 29904

SEQ ID NO: 29906 - protein, 94 aa, Homo sapiens
EASGFPFSRWGMHWVRQAPGKGLEWVAVIWHDGSQRYFADSVQGRFTISRDNSKNTLYLQMTSLRVEDTAVYYCARGDNAFDIWGQGTMVTVSS

SEQ ID NO: 29907 - protein, 98 aa, Homo sapiens
VGSGFSFSTYGMHWVRQAPGKGLDWVAFISYRGTEKYNADSVKGRFTISRDNSRNTLYLQMNSLRAEDTGLYYCANQPRDSQNILWDWGQGTLVTVSS

SEQ ID NO: 29908 - protein, 98 aa, Homo sapiens
AGSGFSFSTYGMHWVRQAPGKGLDWVAFISYRGTTKYNSDAVKGRFTISRDNSKNTLFLQMNSLRPEDTALYFCANQPRDSQNILWDWGQGTLVTVSS

SEQ ID NO: 29909 - protein, 105 aa, Homo sapiens
VASGFTFSNYGMHWVRQAPGKGLDWVSFISSDGSDEYYADSVKGRFTISRDNSNNTVYLQMSSLRPEDTALYYCARRARNYYGFWSGFGNWLDPWGQGTLVTVSS

SEQ ID NO: 29910 - protein, 105 aa, Homo sapiens; identical to SEQ ID NO: 29909

SEQ ID NO: 29911 - protein, 97 aa, Homo sapiens
VASGFSLSGFYMTWIRQTPGKGLEWVSYISNSRSSNILYSESVKGRFTVSRDYAKNSLYLQMNTLRAEDTAVYYCARDWRNKGHDVWGQGTLVTVSS

SEQ ID NO: 29912 - protein, 97 aa, Homo sapiens
VASAFSLRDYYMTWIRQTPGKGLEWVSYISNGYSDTVYYAESVKGRFTVSRDYAKNSLYLQMNTLRVEDTAVYYCARDWRNKGHDVWGQGTLVTVSS

SEQ ID NO: 29913 - protein, 97 aa, Homo sapiens
VASGFSLSAFYMTWIRQSPGKGLEWVSYTSNSRSSNIWYSESVKGRFTVSRDYAKNSLYLQMNTLRAEDTAVYYCARDWRNKGHDVWGQGTLVTVSS

SEQ ID NO: 29914 - protein, 97 aa, Homo sapiens
VASGFSLSAYYMTWIRQTPGKGLEWVSYISNSHSSTIHYAESVKGRFTVSRDYAKNSLYLHMNTLRAEDTAVYYCARDWRNKGHDVWGQGTLVTVSS

SEQ ID NO: 29915 - protein, 97 aa, Homo sapiens
VASAFSLSDYYMTWIRQTPGKGLEWVSYISNSRGSTMYYAESVKGRFTVSRDYAKNSLFLQMNALRAEDTAVYYCARDWRNKGHDVWGPGTLVTVSS

SEQ ID NO: 29916 - protein, 97 aa, Homo sapiens
VASGFSLSAYYMTWIRQTPGKGLEWVSYISNSHSSTIHYAESVKGRFTVSRDYAKNSLYLQMNTLRAEDTAVYYCARDWRNKGHDVWGQGTLVTVSS

SEQ ID NO: 29917 - protein, 96 aa, Homo sapiens
ASGFSLSGYYMTWIRQTPGKGLEWVSYISNSHGTTIYYAESVKGRFTVSRDYAKNSLYLQMNTLRAEDTAVYYCARDWRNKGHDVWGQGTLVTVSS

SEQ ID NO: 29918 - protein, 97 aa, Homo sapiens
VGSAFSLSDFYMTWIRQAPGKGLECISYISNSRGTTIYYAESVKGRFTVSRDYAKNSLYLQMNTLRAEDTAVYYCARDWRNKGHDVWGQGTLVTVSS

SEQ ID NO: 29919 - protein, 97 aa, Homo sapiens; identical to SEQ ID NO: 29911

SEQ ID NO: 29920 - protein, 97 aa, Homo sapiens
VASAFSLGDYYMTWIRQTPGKGLECVSYISNSAGNTIYYAESVKGRFTVSRDYAKNSLYLQMNALRAEDTAVYYCARDWRNKGHDVWGQGTLVTVSS

SEQ ID NO: 29921 - protein, 97 aa, Homo sapiens
VGSGFSLSAYYMTWIRQTPGKGLEWLSYISNSHSNTIHYAESVKGRFTVSRDYAKNSLYLQMNTLRAEDTAIYYCARDWRNKGHDVWGLGTLVTVSS

SEQ ID NO: 29922 - protein, 97 aa, Homo sapiens; identical to SEQ ID NO: 29914

SEQ ID NO: 29923 - protein, 97 aa, Homo sapiens
VASGFSLSAYYMTWIRQTPGKGLEWVSYISNSHSSTIHYAESVKGRFTVSRDYAKNSLYLHMNTLRAEDTAVYYCARDWRNKGHDVWGRGTLVTVSS

SEQ ID NO: 29924 - protein, 97 aa, Homo sapiens
VASAFSLSDYYMTWIRQTPGKGLECVSYISNSAGSTIYYAESVKGRFTVSRDYAKNSLYLQMNTLRAEDTAVYYCARDWRNKGHDVWGQGTLVTVSS

SEQ ID NO: 29925 - protein, 96 aa, Homo sapiens
AASGFTLGDWYMTWIRQPPGKGLEWISYISGSGSSIHYADSVRGRFTVSRDNSKNSLYLQMNSLTVEDTAVYFCARDWRNKGHDVWGQGTLVTVSS

SEQ ID NO: 29926 - protein, 97 aa, Homo sapiens
VASGFSLSAYYMTWIRQTPGKGLEWVSYISNSHSSTIHYAESVKGRFTVSRDYAKNSLYLQINTLRAEDTAVYYCARDWRNKGHDVWGQGTLVTVSS

SEQ ID NO: 29927 - protein, 97 aa, Homo sapiens
VVSGDSMNNVNYAWSWLRQRPGKGLEWIGYIYPSAKTYYTESLKSRVTISVDWSKNQFSLKMTSMTAGDTATYYCARAPQYNWFDPWGQGTLVTVSS

SEQ ID NO: 29928 - protein, 96 aa, Homo sapiens
VSGDSMKNVNYAWTWIRQPPGKGLEWIGYIYPSEKTYYTASLKSRVTISVDWSKNQFSLRMTSMTAGDTAIYYCARAPQYNWFDPWGQGTLVTVPS

SEQ ID NO: 29929 - protein, 97 aa, Homo sapiens
EASGFTLSNSEMNWVRQAPGKGLEWVSYISRGASTIYYGDSVKGRFTLSGDYAKNSLNLQMNSLRVEDTAVYFCAREGTSHDAFDLWGQGTLVTVYS

SEQ ID NO: 29930 - protein, 94 aa, Homo sapiens
ASGFSLSNSEMNWVRQAPGKGLEWVSYISRGASTIYYGDSVKGRFTLSGDYGKNSLHLQMNSLRVEDTAVYFCAREGTSHDAFDLWGQGTLVTV

SEQ ID NO: 29931 - protein, 94 aa, Homo sapiens
ASGFSLSNSEMNWVRQAPGKGLEWVSYISRGASTIYYGDSVKGRFTLSGDYGKNSLHLQRNSLRVEDTAVYFCAREGTSHDAFDLWGQGTLVTV

SEQ ID NO: 29932 - protein, 99 aa, Homo sapiens
NVSGGSISSSYWTWIRQTPGKGLEWIGYIHHTGSAYYNPSLRSRVSISIATSKTQFSLNINSVTAADTAVYYCARTGSGGYTGYIFDYWGQGTLVTVSS

SEQ ID NO: 29933 - protein, 98 aa, Homo sapiens
VSGGSISSSYWTWIRQTPGKGLEWIGYIHHTGSAYYNPSLSSRVSISIATSKTQFSLNIYSVTAADTAVYYCARTGSGGYTGYIFDYWGQGTLVTVSS

SEQ ID NO: 29934 - protein, 96 aa, Homo sapiens
TVSGGSISSYYWSWIRQPPGKGLEWIGYIYYSGSTNYNPSLKSRVTILVDTSKNQFSLKLSSVTAADTAVYYCAGHNSASLPLLLWGQGTLVTVSS

SEQ ID NO: 29935 - protein, 96 aa, Homo sapiens
TVSGGSISSYYWSWIRQPPGKGLEWIGYIYYSGSTNYNPSLKSRVTISVDTSKNQFSLKLSSVSAADTAVYYCAGHNSASLPLLLWGQGTLVTVSS

SEQ ID NO: 29936 - protein, 96 aa, Homo sapiens
TVSGGSISSYYWSWIRQPPGKGLEWIGYIYYSGSTNYNPSLKSRVTISVDTSKNQFSLKLSSVTAADTAVYYCAGHNSASLPLLLWGQGTLVTVSS

SEQ ID NO: 29937 - protein, 99 aa, Homo sapiens
SVSGGSITDHYWNWIRQSPGKGLEWVGHIRKTESTHQNPSLNSRLTLSLDTSKNQISLKLTSVTAADTAVYYCGRSDMSGNSFVEFDYWGQGTLVTVSS

SEQ ID NO: 29938 - protein, 99 aa, Homo sapiens
SVSGGSITDHYWNWIRQSPGKGLEWVGHIRKTETTHQNPSLNGRLTLSLDTSKNQISLKLNSVTAADTAVYYCGRSDMSGNSFVEFDYWGQGTPVTVSS

SEQ ID NO: 29939 - protein, 99 aa, Homo sapiens
SVSGGSITDHYWNWIRQSPGKGLEWVGHIRKTESTHQNPSLNSRLTLSLDTSKNQISLKLSSVTAADTAVYYCGRSDMSGNSFVEFDYWGQGTLVTVSS

SEQ ID NO: 29940 - protein, 99 aa, Homo sapiens; identical to SEQ ID NO: 29939

SEQ ID NO: 29941 - protein, 99 aa, Homo sapiens; identical to SEQ ID NO: 29939

SEQ ID NO: 29942 - protein, 97 aa, Homo sapiens
NVSGGSISSYYWSWIRQPPGKGLEWIGYVYYSGSTNYNPSLKSRVTISVDKSKNQFSLKVTSVSAADTAVYYCARGGTTGWGQFDYWGQGTLVTVSS

SEQ ID NO: 29943 - protein, 97 aa, Homo sapiens; identical to SEQ ID NO: 29942

SEQ ID NO: 29944 - protein, 97 aa, Homo sapiens; identical to SEQ ID NO: 29942

SEQ ID NO: 29945 - protein, 96 aa, Homo sapiens
TVSGGSISNSSYYWGWIRQPPGKGLEWIGSIYYRGSTYYNPSLKSRVTISVDTSKNHFSLKLSSVTAADTAVYYCVYFHTFMFDYWGQGTLVTVSS

SEQ ID NO: 29946 - protein, 96 aa, Homo sapiens
TVSGGSISNSSYYWGWIRQPPGKGLEWIGSIYYRGSTYYNPSLKSRVTISVDTSKNHFSLKLSSVIAADTAVYYCVYFHTFMFDYWGQGTLVTVSS

SEQ ID NO: 29947 - protein, 99 aa, Homo sapiens
AASGFTFTNYAMTWVRQAPGKGLEWVSTISGSGGNTYYADSVKGRFTISRDNSKNTLYLQMNSLRAEDTALYYCAKDRRDDSSSFIDPWGQGTLVIVSS

SEQ ID NO: 29948 - protein, 99 aa, Homo sapiens
AASGFTFFDYAMTWVRQAPGKGLEWVSTISGAGYNTYYADSVKGRFTISRDNSKNTLYLQMNSLRAEDTALYYCAKDRRDDSSSFIDPWGQGTLVIVSS

SEQ ID NO: 29949 - protein, 99 aa, Homo sapiens
AASGFTLFDYAMTWVRQAPGKGLEWVSTISGAGYNTYYADSVKGRFTISRDNSKNTLYLQMNSLRAEDTALYYCAKDRRDDSSSFIDPWGQGTLVIVSS

SEQ ID NO: 29950 - protein, 93 aa, Homo sapiens
AASGFTFSANWMTWVRQAPGKGLEWVANIKEDGSEVHYVDSVRGRFTISRDNARSSLYLQMNSLRAEDTAVYYCARNRGTSHWGQGTLVTVSS

SEQ ID NO: 29951 - protein, 93 aa, Homo sapiens
AASGFTFSGSWMTWVRQAPGKGLEWVAIIKQDGSEKYYVDSVEGRFTISRDNAKSSLFLQMNSLRVEDTAVYYCARNRGTSHWGQGTLVTVSS

SEQ ID NO: 29952 - protein, 93 aa, Homo sapiens
AASGFTFSSNWMTWVRQAPGKGLEWVAIIKQDGSEKNYVDSVKGRFTISRDNAKSSLYLQMNSLRVEDTAVYYCARNRGTSHWGQGTLVTVSS

SEQ ID NO: 29953 - protein, 102 aa, Homo sapiens
TVSGGSISSYDWSWIRQPPGKGLEWIGYIYQSGRTNYDPSLKSRVTMSVDTSKNQISLRLTSVTAADTAVYYCARTLSVSEGYSYYFHMDVWGKGTTVTVAS

SEQ ID NO: 29954 - protein, 102 aa, Homo sapiens
SVSGGSISSYDWSWIRQPPGKGLEWIGYIYQNGRTNYDPSLESRVTMSVDMSKKQISLRLTSVTAADTAVYYCARTLSVSEGYSYYFHMDVWGKGTTVTVAS

SEQ ID NO: 29955 - protein, 96 aa, Homo sapiens
AASGFTFSNSWMSWVRQAPGKGLEWVANIKQDESEKYYVDSVEGRFTISRDNAKNSLYLQMNSLRAEDTAVYYCAREKDGYHYDYWGQGTLVTVSS

SEQ ID NO: 29956 - protein, 96 aa, Homo sapiens
AASGFSFSNSWMSWVRQAPGKGLEWVANIKEDESEKYYVDSVKGRFTISRDNAKNSLYLQMNSLRAEDTAVYYCAREKDGYHYDYWGQGTLVTVSS

SEQ ID NO: 29957 - protein, 96 aa, Homo sapiens
AASGFSFSNSWMSWVRQAPGKGLEWVANIKEDESEKFYVDSVKGRFTISRDNAKNSLYLQMNSLRAEDTAVYYCAREKDGYHYDYWGQGTLVTVSS

SEQ ID NO: 29958 - protein, 98 aa, Homo sapiens
SGGTFISYAISWVRQAPGQGLEWMGGIIPIFGTAKYVQKFQGRVTITADESTSTAYMELRSLRFEDTAVYYCARARYSSGWGAEFDYWGQGTLVTVSS

SEQ ID NO: 29959 - protein, 98 aa, Homo sapiens
SGGTFISYAVSWVRQAPGQGLEWMGGIIPIFGTEKYAQKFQGRVTITADESTSTAYMELRSLRFEDTAVYYCARARYSSGWGAEFDYWGQGTLVTVSS

SEQ ID NO: 29960 - protein, 98 aa, Homo sapiens
SGGTFISYAISWVRQAPGQGLEWMGGIIPIFGTEKYAQKFQGRVTITADESTSTAYMELRSLRFEDTAVYYCARARYSSGWGAEFDYWGQGTLVTVSS

SEQ ID NO: 29961 - protein, 98 aa, Homo sapiens; identical to SEQ ID NO: 29958

SEQ ID NO: 29962 - protein, 98 aa, Homo sapiens
SGGTFISYAISWVRQAPGQGLEWMGGIIPIFGTAKYVQKFQGRVTITADESTSTAYMELRSLRFEDAAVYYCARARYSSGWGAEFDYWGQGTLVTVSS

SEQ ID NO: 29963 - protein, 98 aa, Homo sapiens; identical to SEQ ID NO: 29960

SEQ ID NO: 29964 - protein, 98 aa, Homo sapiens; identical to SEQ ID NO: 29960

SEQ ID NO: 29965 - protein, 93 aa, Homo sapiens
AVYGGSFSGYYWSWIRQPPGKGLEWIGEISHSGSTNYNPSLKSRVTISVDTSKKQFSLKLTSVTAADTAVYYCATGGLHSDYWGQGTLVTVSS

SEQ ID NO: 29966 - protein, 93 aa, Homo sapiens
AVYGGSFSGYYWSWIRQTPGKGLEWIGEINHSGSTNYNPSLKSRVTISVDTSKNHFSLKLSSVTAADTAVYYCATGGLHSDYWGQGTLVTVSS

SEQ ID NO: 29967 - protein, 99 aa, Homo sapiens
AGSGFTFGDYAMHWVRQRPGKGLEWVAGIDWNGKGLSYADSVRGRFSIFRDNTKGSLHLQMDGLRPDDTALYYCAKGGGSSLNNWFDPWGPGTLVTVSS

SEQ ID NO: 29968 - protein, 99 aa, Homo sapiens
AGSGFTFGDYAMHWVRQPPGKGLEWVAAIDWNGKTLSYADSVRGRFTISRDNTKGSLYLQMDGLRADDTALYYCAKGGGSSLNNWFDPWGPGTLVTVSS

SEQ ID NO: 29969 - protein, 102 aa, Homo sapiens
SGVTFDTFTFSWVRQAPGQGLEWMGGIIPILGAANYAQKFQGRVKVTADESSTTAYMELNSLTSDDTAMYYCAGLPRTGSYGGNYYYYMDVWGKGTPVTVSS

SEQ ID NO: 29970 - protein, 102 aa, Homo sapiens
SGVTFDTFTFSWVRQAPGQGLEWMGGIIPILGAANYAQKFQGRVKITADESSTTAYMELNSLTSDDTAMYYCAGLPRTGSYGGNYYYYMDVWGKGTPVTVSS

SEQ ID NO: 29971 - protein, 98 aa, Homo sapiens
VSGASVSVDSHHWTWIRQSPGKGLEWIGRIMYNGATSYNPSLKSRVSISLDTFRNQFSLKLTSVTAADTAFYYCAADPRDGYGHFSDWGQGPLVTVSS

SEQ ID NO: 29972 - protein, 98 aa, Homo sapiens
VSGAYVSVDSHHWTWIRQSPGKGLEWIGRIMYNGATSYNPSLKTRVSISLDTSRNQFSLKLNFVTVADTAFYYCAADPRDGYGHFSDWGQGPLVTVSS

SEQ ID NO: 29973 - protein, 100 aa, Homo sapiens
AVSGFSFSDYYMSWVRQAPGKGLEWLSYISSRRGYTNYADSVKGRFTISRDNAKNSLYLQMNSLRAEDTAMYYCARDKDWNRQTWIFDPWGQGTLVTVSS

SEQ ID NO: 29974 - protein, 100 aa, Homo sapiens
AVSGFTFSDYYMSWVRQAPGKGLEWVSYISSRRGYINYADSVKGRFTISRDNAKNSLYLQMNSLRAEDTAIYYCARDKDWNRQTWIFDPWGQGTLVTVSS

SEQ ID NO: 29975 - protein, 99 aa, Homo sapiens
AASGFTFSTYAMTWVRQAPGKGLEWVSSISGSGGATYYPDPVKGRFTISRDNSNNTLYLQMNSLRAEDTAVYYCAKRPAAILAYYMGVWGKGTTVSVSS

SEQ ID NO: 29976 - protein, 99 aa, Homo sapiens
AASGFTFSTYAMTWVRQAPGKGLEWVSSISGSGGATYYPDSVKGRFTISRDNSNNTLYLQMNSLRAEDTAVYYCAKRPAAILAYYMGVWGKGTTVSVSS

SEQ ID NO: 29977 - protein, 99 aa, Homo sapiens
AASGFTFSTYAMSWVRQAPGKGLEWVSTISGNGGATYYPDSVKGRFTISRDNSKNTLYLQMNSLRAEDTAVYYCAKRPAAILAYYMGVWGKGTTVSVSS

SEQ ID NO: 29978 - protein, 99 aa, Homo sapiens
AASGFTFSTYAMSWVRQAPGKGLEWVSSISGSGGATYYPDSVKGRFTISRDNSNNTLYLQMNSLRAEDTAVYYCAKRPAAILAYYMGVWGKGTTVSVSS

SEQ ID NO: 29979 - protein, 109 aa, Homo sapiens
TVSGDSINNFFWSWIRQPPGKGLEWIGYIYYSEGSDFSGSTTYNPSLKSRVTISVDTSKTQFSLKLTSVTAADTAVYYCARHRTTLFGVVNIPEYFDLWGQGTLVTVSS

SEQ ID NO: 29980 - protein, 109 aa, Homo sapiens
TVSGDSMNNFFWSWIRQPPGKTLEWIGYIYYNEASDFSGSTTYNPSLKSRVTISVDTSKTQFSLNLTSVNSADTAVYYCARHRTTLFGVVNIPEYFDLWGQGTPVTVSS

SEQ ID NO: 29981 - protein, 105 aa, Homo sapiens
AASGFTFRNYAMSWVRQAPGKGLEWVSAISASGRNTYYADSVRGRFSISRDNSKNTLYLQMNSLRVEDTALYYCAQDLPSLKGAFVVVPVAEGYWGQGTLVTVSS

SEQ ID NO: 29982 - protein, 105 aa, Homo sapiens
AASGFTFRNYAMSWVRQAPGKGLEWVSAISASGRNTYYADSVKGRFSISRDNSKNTLYLQMNSLRAEDTALYYCAQDLPSLKGAFVVVPVAEGYWGQGTLVTVSS

SEQ ID NO: 29983 - protein, 98 aa, Homo sapiens
EASGFTFATYSMNWVRQAPGRGLEWVSFISDTARNMLYADSVRGRFTISRDNAKSSLYLQMDGLRDEDTAVYYCARSLPIPGVVFEYWGQGALVTVSS

SEQ ID NO: 29984 - protein, 97 aa, Homo sapiens
AASGFTFAEYSMNWVRQTPGKGLEWVSFISDTARNMLYADSVRGRFTISRDNGKSSLYLQMDGLRDEDTAVYYCARSLPIPGVVFEYWGQGTLVTVS

SEQ ID NO: 29985 - protein, 97 aa, Homo sapiens
AASGFTFAEYSMNWVRQAPGKGLEWVSFISDTARHMLYADSVRGRFTISRDNGKSSLYLQMDGLRDEDTAVYYCARSLPIPGVVFEYWGQGTLVTVS

SEQ ID NO: 29986 - protein, 103 aa, Homo sapiens
AASGFTFSNVWMSWVRQAPGKGLEWIGRIKSKTDGETTDYAAPVKGRFSISRDDSKNTLYLHMNSLQTEDTAVYYCTTVRYCGGGAVYCFDYWGQGTLVTVSS

SEQ ID NO: 29987 - protein, 103 aa, Homo sapiens
AASGFTFSNVWMSWVRQAPGKGLEWIGRIKSKTDGETTDYAAPVKGRFTISRDDSKNTLYLHMNSLQTEDTAVYYCTTVRYCGGGAVYCFDYWGQGTLVTVSS

SEQ ID NO: 29988 - protein, 103 aa, Homo sapiens
AASGFTFSNVWMSWVRQAPGKGLEWIGRIKSKTDGETTDYAAPVKGRFTISRDDSKNTLYLQMNSLQTEDTAVYHCTTVRYCGGGAVYCFDYWGQGTLVTVSS

SEQ ID NO: 29989 - protein, 96 aa, Homo sapiens
ATFGFTFSSYGFHWVRQAPGKGLEWVACIWNDGSQKYHADSVKGRFTISRDDSKNTVFLEMIHLRGEDTAIYYCARDIGRTALGQWGQGALVTVSS

SEQ ID NO: 29990 - protein, 96 aa, Homo sapiens
ATFGFTFTSHGFHWVRQAPGKGLEWVACIWKDGSQKYHADSVKGRFTISRDDSKNTVFLEMNNLRAEDTATYYCARDIGRTALGQWGQGALVTVSS

SEQ ID NO: 29991 - protein, 93 aa, Homo sapiens
AASGFTFSSSWMTWVRQPPGKGLEWVANIKEDGSDKYYVDSVKGRFTISRDNPKNSLYLQMNNLRVEDTAFYYCARYRGAGDWGQGSLVIVSS

SEQ ID NO: 29992 - protein, 93 aa, Homo sapiens
AASGFTFSSSWMTWVRQAPGKGLEWVANIKEDGGEKYYVDSVKGRFTISRDNPKNSLYLQMNNLRVEDTAVYYCARYRGAGDWGQGSLVTVSS

SEQ ID NO: 29993 - protein, 93 aa, Homo sapiens
AASGFTFSDSWMTWVRQPPGKGLEWVANIKEDGSDKYYVDSVKGRFTISRDNPKNSLYLQMNNLRVEDTAFYYCARYRGAGDWGQGSLVIVSS

SEQ ID NO: 29994 - protein, 93 aa, Homo sapiens
AASGFTFSGDWMTWVRQPPGKGLEWVANIKEDGGEKYYVDSVKGRFTISRDNPKRSLYLQMDNLRAEDTAVYYCARYRGAGDWGQGSLVTVSS

SEQ ID NO: 29995 - protein, 97 aa, Homo sapiens
TVSGGSISTYYWSWIRQPPGKGLEWIGYIYYTGSTNYNPSLKSRVTMSVDTSRNQFSLKVSSVTAADTAVYYCARGAQVVPHYMDVWGRGTTVTVSS

SEQ ID NO: 29996 - protein, 97 aa, Homo sapiens; identical to SEQ ID NO: 29995

SEQ ID NO: 29997 - protein, 102 aa, Homo sapiens
KGSGYSFSTYWIAWVRQMPGKGLEWMGIIYPGDSDTKYSPSFQGQVSISADKSINTAYLQWSSLKASDTAMYYCARRELAYCGAECYFFDYWGQGTLVTVSS

SEQ ID NO: 29998 - protein, 102 aa, Homo sapiens; identical to SEQ ID NO: 29997

SEQ ID NO: 29999 - protein, 102 aa, Homo sapiens
KGSGYSFSTYWIAWVRQMPGKGLEWMGIIYPGDSDTRYSPSFQGQVSISADKSINTAYLQWSSLKASDTAMYYCARRELAYCGAECYFFDYWGQGTLVTVSS

SEQ ID NO: 30000 - protein, 99 aa, Homo sapiens
SVSGGSITDHYWNWIRQSPGKGLEWVGHIRKTENTHQNPSLNSRLTLSLDTSKNQISLKLSSVTAADTAVYYCGRSDTRGNSFVEFDYWGQGILVTVSS

SEQ ID NO: 30001 - protein, 99 aa, Homo sapiens
SVSGGSITDHYWNWIRQSPGKGLEWVGHIRKTESTHQNPSLNGRLTLSLDTSKNQISLKLTSVTAADTAVYYCGRSDTRGNSFVEFDYWGQGTLVTVSS

SEQ ID NO: 30002 - protein, 99 aa, Homo sapiens
GSGYIFGNHWIAWVRRRPGKGLEWMGITYPGSSLLKYNPSFEGRVTISADKSINTAYLQWSSLQASDTATYYCARHRGVFFDTFSFDFWGQGTQVTVSS

SEQ ID NO: 30003 - protein, 99 aa, Homo sapiens
ASGYIFGNHWIAWVRRRPGKGLEWMGITYPGSSLLKYNPSFEGRVTISADKSINTAYLQWSSLQASDTATYYCARHRGVFFDTFSFDFWGQGTQVTVSS

SEQ ID NO: 30004 - protein, 99 aa, Homo sapiens
KASGYNFSRKWIGWVRQMPGKGLEWLGIIYPADSDIRYSPALQGQVTISADESISTTYLQWGSLRASDTAVYYCATGSGDYRRTHFDYWGQGTLVTVSS

SEQ ID NO: 30005 - protein, 99 aa, Homo sapiens
KASGYNFSRKWIGWVRQMPGKGLEWLGIIYPADSDTRYSPALQGQVTISADESISTTFLQWGSLRASDTAVYYCATGSGDYRRTHFDYWGQGTLVTVSS

SEQ ID NO: 30006 - protein, 96 aa, Homo sapiens
AASGFTFSSYVMHWVRQAPGKGLVWVARISHDMSVTIYEDSVKGRFTISRDNAKNTLYLQMNSLRGEDTGLYYCVRDDGNWGLDYWGQGTVVTVSS

SEQ ID NO: 30007 - protein, 96 aa, Homo sapiens
AASGFTFSNYVMHWVRQAPGKGLVWVARLSHEMTGTVYADSVKGRFTISRDNAENTLYLQLNSLRGEDTGIYYCVRDDGNWGLDYWGQGTVVTVSS

SEQ ID NO: 30008 - protein, 101 aa, Homo sapiens
TVSGVSLSSSTHYWGWIRQASGKGLEWIGNIFHDGATNYNPSLNNRVSLSVDTSKNQFSLKLRSVTAADTAIYYCARRGDYGGAWNWFGPWGQGALVTVSS

SEQ ID NO: 30009 - protein, 100 aa, Homo sapiens
VSGASISTSTHYWAWLRLAPGEGLEWIGNIFNDGATNYNPSLKSRVTMSVDTAKNQFFLNLRSVTAADTATYYCARRGDYGGAWNWFGPWGQGTLVTVSS

SEQ ID NO: 30010 - protein, 113 aa, Homo sapiens
AASGFTFSTYYMTWVRQSPGQGLEWVSSISYTSGDIFYSDSVKGRFTISRDNAQNSLYLQMNSLGADDTAVYYCARGGAQFGPWVAGLGIHGYYHHYFYMDVWGQGTPVTVSS

SEQ ID NO: 30011 - protein, 113 aa, Homo sapiens
AASGFTFSTYYMTWVRQAPGQGLEWVSSISYTSGDIFYSDSVKGRFTISRDNAQNSLYLQMNSLGADDTAVYYCARGGAQFGPWVAGLGIHGYYHHYFYMDVWGQGTPVTVSS

SEQ ID NO: 30012 - protein, 95 aa, Homo sapiens
GSGFTFDSYAFDWVRQAPGKGLEWVAAISNGGDRAYLADSVQGRFSVFRDNSKSTLYLHMDNLRVEDSAIYYCGKNLPGHTPEHWGQGTVVTVSS

SEQ ID NO: 30013 - protein, 95 aa, Homo sapiens; identical to SEQ ID NO: 30012

SEQ ID NO: 30014 - protein, 98 aa, Homo sapiens
AASGFTFSGSGMHWVRQASGKGLEWVGRIGGKPNSYATVYGGSVKGTFTISRDDSKNTAYLQMNSLKTDDTAVYYCTCKWNDVGSDYWGQGTLVTVSS

SEQ ID NO: 30015 - protein, 98 aa, Homo sapiens
AASGFTCSDSGIHWVRQASGKGLEWVGRIGGKPHNYATVYGGSVKGTFTISRDDSKNTAYLQMSSLKTDDTAVYYCTCKWNDVGSDYWGQGTLVTVSS

SEQ ID NO: 30016 - protein, 98 aa, Homo sapiens
AASGFTFSGSGIHWVRQASGKGLEWVGRIGGKPNNYATVYGGSVKGTFTISRDDSKNTAYLQMNSLKTDDTAVYYCTCKWNDVGSDYWGQGTLVTVSS

SEQ ID NO: 30017 - protein, 101 aa, Homo sapiens
SGFSFSDDWMTWVRQSQGKGLEWVAHINSDGSERYYLDSVKGRFTISRDNVKNSLYLQMDSMSVDDTAIYYCVREHLIGHHSDGPPHFDHWGQGTLVTVSS

SEQ ID NO: 30018 - protein, 101 aa, Homo sapiens
SGITLSDDWMTWVRQSQGKGLEWVAHINPDGSERYYLDSVKGRFTISRDNVKNSLYLQMDSLSVDDTALYFCVREHLIGHHSDGPPHFDHWGQGAQVTVSS

SEQ ID NO: 30019 - protein, 100 aa, Homo sapiens
AAPGFIFDNYAFHWVRQPPGKGLEWVSGISRTSANIGYADSVKGRFTISRDNARDSLFLQMNSLGPEDTALYYCARDLGTGSGGGYFDDWGQGTLVIVSS

SEQ ID NO: 30020 - protein, 100 aa, Homo sapiens
AASGFIFDNYAFHWVRQPPGKGLEWVSGIGRRSVNIGYADSVKGRFTISRDNAKNSLFLQMNSLGPEDTALYYCARDLGTGSGGGYFDDWGQGTLVIVSS

SEQ ID NO: 30021 - protein, 100 aa, Homo sapiens
AASGFIFDNYAFHWVRQPPGKGLEWVSGIGRKSVNIGYADSVKGRFTISRDNAKNSLFLQMNSLGPEDTALYYCARDLGTGSGGGYFDDWGQGTLVTVSS

SEQ ID NO: 30022 - protein, 99 aa, Homo sapiens
AASGFTFSNAWMSWVRQAPGKGLEWVGRIKSKKDGETTDYAAPVKGRFTVSRDDSKNMVYLQMNSLKTEDIAVYYCAKGALPGTFFDYWGQGTLVTVTS

SEQ ID NO: 30023 - protein, 99 aa, Homo sapiens
AASGFTFSHAWMSWVRQAPGKGLEWVGRIKSKKDGETTDYAAPVKGRFTVSRDDSKNMVYLQMNGLKTEDIGVYYCAKGALPGTFFDYWGQGTLVTVTS

SEQ ID NO: 30024 - protein, 101 aa, Homo sapiens
AASGFTFNIYGINWVRQAPGKGLEWISGISGSGDLTFYADSVKGRFTVSRDNPKSTLYLQMNSLRAEDTAVYYCATSLSRLVVVGGYFLHWGQGTLVTVSS

SEQ ID NO: 30025 - protein, 101 aa, Homo sapiens
AASGFTFNIYGINWVRQAPGKGLEWIAGISGSGDLTFYADSVKGRFTVSRDNPKSTLYLQMNSLRAEDTAVYYCATSLSRLVVVGGYFLHWGQGTLVSVSS

SEQ ID NO: 30026 - protein, 103 aa, Homo sapiens
ASGVTFSDFYIHWVRQAPGQGLEWMGVINPKGGTTTHAQNFQDRIIVSWDTSTGTAFMELTSLGSEDTAVYYCALERLLYSGNYFFNRRYDPWGQGTLVTVSS

SEQ ID NO: 30027 - protein, 103 aa, Homo sapiens
ASGVTFSDFYIHWVRQAPGQGLEWMGVINPKGGTTTHAQNFQGRIIVSWDTSTGTAFMELTSLGSEDTAVYYCALERLLYSGNYFFNRRYDPWGQGTLVTVSS

SEQ ID NO: 30028 - protein, 97 aa, Homo sapiens
AASGFTFSSHSMSWVRQAPGKGLEWVSSISPNSDAIFYADSVEGRVTTSRDNSRNTLFLEMNSLRAEDTAIYYCGRGAAAARKVDYWGQGTLVTVSS

SEQ ID NO: 30029 - protein, 97 aa, Homo sapiens
AASGFTFSRHSMSWVRQAPGKGLEWVSSISPNSDDIFHADSVEGRVTTSRDNSRNTLFLEMNSLRAEDTAIYYCGRGAAAARKVDYWGQGTRVTVSS

SEQ ID NO: 30030 - protein, 98 aa, Homo sapiens
ASGYTFTNFPIHWLRQVPGQGLEWMGWINVGNGYTNYSQKFQGGLSITADTSASSVYMELGSLRSEDTALYFCARGMGGAYYQYMDVWGRGTTVTVSS

SEQ ID NO: 30031 - protein, 98 aa, Homo sapiens
ASGYSFTNFPIHWLRQAPGQGLEWMGWINVGNGYTNYSQKFQGGLSITADTSASSVYMELGSLRSEDTALYFCARGMGGAYYQYMDVWGRGTTVTVSS

SEQ ID NO: 30032 - protein, 111 aa, Homo sapiens
TQTLTLTCTFSGFSLTTSGTCVSWIRQAPGKALEWLARIDWDGDKYYTKSLRTRLTLSKDTSENQVVLTMTNMDPADTATYYCARMGGVASRPGRDWFDPWGPGTQVIVSS

SEQ ID NO: 30033 - protein, 111 aa, Homo sapiens
TQTLTLTCTFSGFSLTTSGTCVSWIRQAPGKALEWLARIDWDDDKYYTKSLRTRLTLSKDTSENQVVLTMTNMDAADTATYYCARMGGVASRPGRDWFDPWGPGTQVIVSS

SEQ ID NO: 30034 - protein, 102 aa, Homo sapiens
ATSGFTFSHHDMTWVRQAPGKGLEWVSMISRSGDAAYYTDSVKGRFITSRDNSKNTMFLEMNSLRAEDTGVYYCVKPGYCSIVNCYSWFASWGPGTQVTVSS

SEQ ID NO: 30035 - protein, 102 aa, Homo sapiens
ATSGFTFSHHDMTWVRQAPGKGLEWVSMISRSGDAAYYTDSVKGRFTTSRDNSKNTMFLEMDSLRAEDTGVYYCVKPGYCSIVNCYSWFASWGQGTQVTVSS

SEQ ID NO: 30036 - protein, 103 aa, Homo sapiens
AASGFTFHNFWMYWVRLVPGKGLEWVSSIDEDGDSPRYADSAKGRFTMSRDNAENTVYLQMTSLRVDDSAVYYCARPARVYNDPDFRNFMAVWGSGTTVTVSS

SEQ ID NO: 30037 - protein, 103 aa, Homo sapiens
AASGFTFHNFWMYWVRLVPGKGLEWVSSIDEDGDSPRYADSAKGRFTMSRDNADNIVYLQMTSLRVDDSAVYYCARPARVYNDPDFRNFMAVWGSGTTVTVSS

SEQ ID NO: 30038 - protein, 104 aa, Homo sapiens
AASGFTFRNFWIYWVRLVPGKGLEWVSSIDEEDGDSPRYADSVKGRFTMSRDNAENIVYLQMTSLRVDDSAVYYCARPARVYNDPDFRNFMAVWGSGTTVTVSS

SEQ ID NO: 30039 - protein, 103 aa, Homo sapiens
AASGFTFHNFWMYWVRLVPGKGLEWVSSIDEDDDSPRYADSAKGRFTMSRDNADNIVYLQMTSLRVDDSAVYYCARPARVYNDPDFRNFMAVWGSGTTVTVSS

SEQ ID NO: 30040 - protein, 103 aa, Homo sapiens
TVSGGSISISTYYWAWIRQSPGGGLEWIGSLYYTGNTYYNPSLKSRVTISVDTSNNQFSLSLTYVTAADTALYYCARQSRYYNSETSYGFDVWGQGTRVDVSS

SEQ ID NO: 30041 - protein, 103 aa, Homo sapiens
TVSGGSISISTYYWAWIRQSPGGGLEWIGSLYYTGNTYYNPSLKSRVAISVDTSNNQFSLSLTYMTAADTALYYCARQSRYYNSETSYGFDVWGQGARVDVSS

SEQ ID NO: 30042 - protein, 105 aa, Homo sapiens
TVSGGSISSSSSYWGWIRQPPGKGLEWIGSIYYSGSTYYNPSLKSRVTMSVDTSKNQFSLKLNTVTAADTAVYYCARHRGTTVVWDYYYYYMDVWGKGTTVTVSS

SEQ ID NO: 30043 - protein, 105 aa, Homo sapiens
TVSGGSISSSSSYWGWIRQPPGKGLEWIGSIYYSGSTYYNPSLKSRVTMSVDTSKNQFSLKLNTVTAADTAAYYCARHRGTTVVWDYYYYYMDVWGKGTTVTVSS

SEQ ID NO: 30044 - protein, 98 aa, Homo sapiens
AASGFMFSDSGIHWVRQASGKGLEWVGRIRNKDNNYATEYAASVKGRFTIARDESRAYLHMDGLKTEDTAVYFCFRRYCIGGGCSCDWGQGTLVTVSS

SEQ ID NO: 30045 - protein, 100 aa, Homo sapiens
AAFGFPFSDSGIHWVRQASGKGLEWLGRVRNKDNNYAAEYAASVKGRFTVARDESRNTAYLHMDSLKSEDTAVYYCFRRYCIGGGCSCDWGQGTLVTVSS

SEQ ID NO: 30046 - protein, 100 aa, Homo sapiens
AASGFTFSSYYMTWVRQAPGKGLEWVANIKRDGSEKYYMDSVKGRFTISRDNVKNSLYLQMNNLRVEDTAVYYCARDGYRVAATVELDHWGQGILVTVSS

SEQ ID NO: 30047 - protein, 100 aa, Homo sapiens
AASGFTFSSYYMTWVRQAPGKGLEWVANIKRDGSEKYYVDSVKGRFTISRDNAKNSLYLQMNNLRVEDTAVYYCARDGYRVAATVELDHWGQGILVTVSS

SEQ ID NO: 30048 - protein, 102 aa, Homo sapiens
AASGFTFSDYPMAWVRQAPGKGLEWVSSISSGSTYIFYADSVKGRSTISRDNAKNSLYLQMNSLRAEDTAIYYCARDRSSSNCYVCGLHDYWGQGTLVTVSS

SEQ ID NO: 30049 - protein, 102 aa, Homo sapiens
AASGFTFSNYPMAWVRQAPGKGLEWVSSISSSSGYIFYADSVKGRSTISRDNARNSLYLQMNSLRAEDTAVYYCARDRSSSNCYVCGLHDYWGQGTLVTVSS

SEQ ID NO: 30050 - protein, 103 aa, Homo sapiens
TVSGDSISSRSDYWAWIRQPPGKGLEWIGNIYYSGSTYYNPSLKSRVSISVDTSKNQFSLNLSSVTAADTAVYYCARHDYNFWSGYYSRIDYWGQGTLVTVSS

SEQ ID NO: 30051 - protein, 103 aa, Homo sapiens; identical to SEQ ID NO: 30050

SEQ ID NO: 30052 - protein, 101 aa, Homo sapiens
AASGFSVSSNYMSWVRQAPGKGLEWVSVIYGGGTTYYADSVKGRFTISRDNSKDTLYLQMNSLRAEDTAVYYCARVAMVRGLTIRWYFDLWGRGTLVTVSS

SEQ ID NO: 30053 - protein, 101 aa, Homo sapiens; identical to SEQ ID NO: 30052

SEQ ID NO: 30054 - protein, 101 aa, Homo sapiens; identical to SEQ ID NO: 30052

SEQ ID NO: 30055 - protein, 98 aa, Homo sapiens
SASGFTFSSHSMHWVRQAPGGGPEYVSGINAYGENTFYADSVRGRFAISRDNSRNTLYLQMSSLRTEDTALYSCVKSMDRGLTPMDVWGKGTMVTVSS

SEQ ID NO: 30056 - protein, 98 aa, Homo sapiens
SASGFTFSSHSMHWVRQAPGGGPEYVSGINSNGDHTFYADSVRGRFAISRDNSRNTLYLQMSSLRTEDTAVYSCVKSMDRGLTPMDVWGKGTMVTVSS

SEQ ID NO: 30057 - protein, 99 aa, Homo sapiens
ISGDSVSSNSAVWNWIRQSPSRGLEWLGRTYYRSKWYNDYAVSVEGRIIFNSDTSKNQFSLQLNSVTPEDTAVYYCARLITGRGYFDQWGQGTLVTVSS

SEQ ID NO: 30058 - protein, 99 aa, Homo sapiens; identical to SEQ ID NO: 30057

SEQ ID NO: 30059 - protein, 98 aa, Homo sapiens
AASGFIFSNYAISWVRRAPGKGLEWVAAIRGPGDNTYYADSVKGRFTISRDNSKSTAFLQMDSLIAEDTAMYFCVKDESASFRLAEYWGQGTLVTVSS

SEQ ID NO: 30060 - protein, 98 aa, Homo sapiens
AASGFIFSSYAISWVRQAPGKGLEWVSAIRGPGDNTYYADSVKGRFTISRDNSKNTAFLQMDSLIAEDTAIYFCVKDESASFRLAEYWGQGTLVTVSS

SEQ ID NO: 30061 - protein, 98 aa, Homo sapiens
AASGFIFSNYAISWVRQAPGKGLEWVSAIRGPGDNTYYADSVKGRFTISRDNSKNTAFLQMESLIAEDTAIYFCVKDESASFRLAEYWGQGTLVTVSS

SEQ ID NO: 30062 - protein, 98 aa, Homo sapiens
AASGFIFSSYAISWVRQAPGKGLQWVSAIRGPGDNTYYADSVKGRFTISRDNSKNTAFLQMDSLIAEDTAIYFCVKDESASFRLAEYWGQGTLVTVSS

SEQ ID NO: 30063 - protein, 108 aa, Homo sapiens
AASGFTFSSYAMNWVRQAPGKGLEWVSSISSSSNYIYYGDSVKGRFTITRDNAKNSLYLQMNSLRAEDTAVYNCARWDEGSSSWYRGTKFDYYYMDVWGKGTTVTVSS

SEQ ID NO: 30064 - protein, 108 aa, Homo sapiens
AASGFTFSNYAMNWVRQAPGKGLEWVSSISSSSNYIYYGDSVKGRFTITRDNAKNSLYLQMNSLRAEDTAVYNCARWDEGSSSWYRGTKFDYYYMDVWGKGTTVTVSS

SEQ ID NO: 30065 - protein, 108 aa, Homo sapiens
AASGFTFSSYAMNWVRQAPGKGLEWVSSISSSSNFIYYGDSVKGRFTITRDNAKNSLYLQMNSLRAEDTAVYNCARWDEGSSSWYRGTKFDYYYMDVWGKGTTVTVSS

SEQ ID NO: 30066 - protein, 99 aa, Homo sapiens
VASGFTFSGYAMHWVRQAPGKGLEYVSAISSNGGSTYYANSVKGRFTISRDNSDNTLYLQMGSLRAEDMAVYYCARARCSSSSCLFDSWGQGTLVTVSS

SEQ ID NO: 30067 - protein, 99 aa, Homo sapiens
AASGFTFSGYAMHWVRQAPGKGLEYVSAISSNGGSTYYANSVKGRFTISRDNSDNTLYLQMGSLRAEDMAVYYCARARCSSSSCLFDSWGQGTLVTVSS

SEQ ID NO: 30068 - protein, 103 aa, Homo sapiens
TLSGGFISGSGYYWNWVRQRPGKGLEWIGNIFYSGVTAFDPSLTSRLSMSVDTSKNQFSMTLSSVTVADSATYYCARERGADNYGTAGAFDVWGPGTLVMVSS

SEQ ID NO: 30069 - protein, 103 aa, Homo sapiens
TLSGGFISGSGYYWNWVRQRPGKGLEWIGNIFYSGVTSFDPSLTSRLSMSVDTSKNQFSMTLTSVTVADSATYYCARERGADNYGTAGAFDVWGPGTLVTVSS

SEQ ID NO: 30070 - protein, 102 aa, Homo sapiens
AASGFTFSSYAMSWVRQAPGKGLEWVSAISGSGGGTDYADSVKGRFTISRDNSKNTLYLQMNSLRAEDTALYYCAKDISCRDCTRTSCHDYWGQGTLVTVSS

SEQ ID NO: 30071 - protein, 102 aa, Homo sapiens
AASGFTFSSFAMSWVRQAPGKGLEWVSAISASGGNTDYADSVKGRFTISRDNSKNTLFLQMNSLRAEDTAVYYCAKDISCRDCTRTSCHDYWGQGTLVTVSS

SEQ ID NO: 30072 - protein, 102 aa, Homo sapiens
AASGFTFSSFAMSWVRQAPGKGLEWVSAITGSGGSTDYADSVKGRFTISRDNSENTLYLQMNSLRAEDTALYYCAKDISCRDCTRTSCHDYWGQGTLVTVSS

SEQ ID NO: 30073 - protein, 108 aa, Homo sapiens
TVSGGSISSGHYYWGWIRQPPGKGLEWIGSIYYSGTTYYNPSLKSRATISIDTSKNHVALKVSSVAAADTAVYYCARLGYCTSGSCYGVHYYNYMDVLGKGTTVTVSS

SEQ ID NO: 30074 - protein, 108 aa, Homo sapiens
TVSGGSISSGHYYWGWIRQPPGKGLEWIGSIYYSGTTYYNPSLKSRATISIDTSKNHFALKVSSVAAADTAVYYCARLGYCTSGSCYGVHYYNYMDVLGKGTTVTVSS

SEQ ID NO: 30075 - protein, 108 aa, Homo sapiens; identical to SEQ ID NO: 30074

SEQ ID NO: 30076 - protein, 108 aa, Homo sapiens
TVYGDSISSGNYYWGWIRQPPGKGLEWIGSIYYSGTTYYNPSLKSRVTISADTSKNQFALKVSSVTAADTAVYYCARLGYCTSGSCYGVHYYNYMDVFGKGTTVTVSS

SEQ ID NO: 30077 - protein, 101 aa, Homo sapiens
AASAFTFGLYSMNWVRQAPGKGLEWVSSISRDSSYIYYADSVKGRFTTSRDNAKNSLYLQLYSLRAADTAVYYCARVLAPVTTEYYYMDVWGKGTTVTVSS

SEQ ID NO: 30078 - protein, 101 aa, Homo sapiens
AASGFTFSLYSMNWVRQAPGKGLEWVSSINSDSDYIYYADSLKGRFTTSRDNAKNSLFLQMYSLTAADTAVYYCARVLAPVTTEYYYMDVWGKGTTVTVSS

SEQ ID NO: 30079 - protein, 101 aa, Homo sapiens
AASGFTFSLYSMNWVRQAPGKGLEWVSSINSDSSYIYYADSLKGRFTTSRDNAKNSLYLQMYSLTAADTAVYYCARVLAPVTTEYYYMDVWGKGTTVTVSS

SEQ ID NO: 30080 - protein, 103 aa, Homo sapiens
ASGYTFTDYDINWVRQAAGQGLEWMGWANPKSGNTGYAQKFQGRVTMTRDTSTNTAYMELSALTPDDTAFYYCARPKEMARIRDPADWYFDLWGRGTLVTVSS

SEQ ID NO: 30081 - protein, 103 aa, Homo sapiens
ASGYTFTDYDINWVRQAAGQGLEWMGWANPRSGNTGYAQKFQGRVTMTRDTSTNTAYMELSALTPDDTAVYYCARPKEMARIRDPADWYFDLWGRGTLVTVSS

SEQ ID NO: 30082 - protein, 98 aa, Homo sapiens
AASGFTFGSYWMTWVRQSPGKGLEWVANIKKDGSERYYVDSVKGRFTISRDNTKNSLYLQMNSLRAEDTAVYYCAKGGMTSSWFWVDWGQGTLVTVSS

SEQ ID NO: 30083 - protein, 98 aa, Homo sapiens
ATSGFTFSSYWMTWVRQSPGKGLEWVANIKQNGGEKYYVDSVKGRFTISRDNAKNSLYLQMNSLRAEDTAVYYCAKGGMTSSWFWVDWGQGTLVTVSS

SEQ ID NO: 30084 - protein, 98 aa, Homo sapiens
AASGFTFSNYWMTWVRQSPGKGLEWVANIKQDGSEKYYVDSVKGRFTMSRDNAKNSMYLQLNSLRAEDTAVYYCAKGGMTSSWFWVDWGQGTLVTVSS

SEQ ID NO: 30085 - protein, 98 aa, Homo sapiens
AASGFTFSSYWMTWVRQSPGKGLEWVANIKRDGSEKYYVDSVKGRFIISRDNAKNSLYLQMNSLRAEDTAVYYCAKGGMTSSWFWVDWGQGTLVTVSS

SEQ ID NO: 30086 - protein, 98 aa, Homo sapiens
AASGFTFGSYWMTWVRQSPGKGLEWVANIKKDGGEKYYVDSVKGRFTISRDNAKNSLYLQMNSLRAEDTAVYYCAKGGMTSSWFWVDWGQGILVTVSS

SEQ ID NO: 30087 - protein, 98 aa, Homo sapiens
AASGFTFSSYWMTWVRQSPGKGLEWVANIKQEGSERYYVDSVKGRFTISRDNAKSSLFLQMNSLRAEDTAVYYCAKGGMTSSWFWVDWGQGTLVTVSS

SEQ ID NO: 30088 - protein, 98 aa, Homo sapiens
ASGFTFSDYYMSWIRQAPGKGLEWVSYISGSSSSTNYADSVKGRFTISRDNAKNSLYLQMNSLRAEDSAVYYCARDYYTLGAVLIADWGQGTLVTVSS

SEQ ID NO: 30089 - protein, 99 aa, Homo sapiens
AASGFTFSDYYMSWIRQAPGKGLEWVSYISGSSSSTNYADSVKGRFTISRDNAKNSLYLQMNSLRAEDSAVYYCARDYYTLGAVLIADWGQGTLVTVSS

SEQ ID NO: 30090 - protein, 99 aa, Homo sapiens
VASGFTFSIYTMNWVRQAPGKRPEWVSSIISSSSYMSYADSVKGRFTISRDNAKNSIYLQMNSLRAEDTAVYYCARDLGTGGSWPFDYWGQGTLVIVSS

SEQ ID NO: 30091 - protein, 99 aa, Homo sapiens; identical to SEQ ID NO: 30090

SEQ ID NO: 30092 - protein, 105 aa, Homo sapiens
ASGYTFTDYYIHWVRQAPGQGLEWMGWINPNSGVTKYAQKFQDWVTITSDTSISTAFMELSRVTSDDTAVYYCARDGAAHDLLTGYQPSYYMDVWGEGTTVTVSS

SEQ ID NO: 30093 - protein, 105 aa, Homo sapiens
ASGYSFTDYYIHWVRQAPGQGLEWMGWINPKSGVTKYAQKFQDWVTISSDTSTSTAFMEVSRVTSDDTAVYYCARDGAAHDLLTGYQPSYYMDVWGEGTTVTVSS

SEQ ID NO: 30094 - protein, 97 aa, Homo sapiens
VASGFTFSTYPMNWVRQSPGKGLEWLSYINKGSDSIYYADSVRGRFTISRDNAKNSLYLHMNSLRDDDTAVYYCARDDETGWYSPYWGQGTLVTVSS

SEQ ID NO: 30095 - protein, 97 aa, Homo sapiens
VASGFTFSTYPMNWVRQSPGKGLEWLSYINKGSDYIYYADSVRGRFTISRDNAKNSLYLHMNSLRDDDTAVYYCARDDETGWYSPYWGQGTLVTVSS

SEQ ID NO: 30096 - protein, 97 aa, Homo sapiens
AASGFTFSFYVMSWVRQSPGKGLQWLSYINGGSDYIYYADSVRGRFTISRDNAKNSLYLHMNSLRDDDTAVYYCARDDETGWYSPYWGQGTLVTVSS

SEQ ID NO: 30097 - protein, 96 aa, Homo sapiens
ASGFTFSTYPMNWVRQSPGKGLQWLSYINGGSDYIYYADSVRGRFTISRDNAKNSLYLHMNSLRDDDTAVYYCARDDETGWYSPYWGQGTLVTVSS

SEQ ID NO: 30098 - protein, 100 aa, Homo sapiens
SGYTFTSYGVSWVRQAPGQGLEWMGWISCYDGETRYAQKFQGRVTLTIDTPTTTVYMELRSLTSDDTAVYYCARVRAAAGRGRPGVFDSWGQGTLVTVSS

SEQ ID NO: 30099 - protein, 100 aa, Homo sapiens; identical to SEQ ID NO: 30098

SEQ ID NO: 30100 - protein, 103 aa, Homo sapiens
AASGFTFSSYSMNWVRQAPGKGLEWVSSITSSSSSTYYADSVEGRFTISRDNARNSLSLQMNSLTAEDTALYYCARDASCGGTTNCHDYFDYWGRGTLVTVSS

SEQ ID NO: 30101 - protein, 103 aa, Homo sapiens
AASGFTFSTYSMNWVRQAPGKGLEWVSSITGSSSSTYYADSVEGRFTISRDNARNSLSLQMNSLTAEDTAVYYCARDASCGGTTNCHDYFDYWGRGTLVTVSS

SEQ ID NO: 30102 - protein, 103 aa, Homo sapiens
EASGFTSSSYSMNWVRQAPGKGLEWVSSITSSSTSKYYADSMKGRFTISRDNARNSLYLQMNSLRAEDTAVYYCARDASCGGTTNCHDYFDYWGQGILVTVSS

SEQ ID NO: 30103 - protein, 103 aa, Homo sapiens; identical to SEQ ID NO: 30100

SEQ ID NO: 30104 - protein, 101 aa, Homo sapiens
SVSGGSITDNYWNWIRQSPGKGLEWIAYVHYTGSTNYNPSLKSRVSISLDRSMKQFSLQMFSVTAADTAVYFCARGSGCRSGRCYFYFDTWGQGTLVTVSS

SEQ ID NO: 30105 - protein, 101 aa, Homo sapiens
SVSGDSITDNYWNWIRQSPGKGLEWIAYVHYTGSTNYNPSLKSRVSISLDRSMKQFSLQMFSVTAADTAVYFCARGSGCRSGRCYFYFDTWGQGTLVTVSS

SEQ ID NO: 30106 - protein, 107 aa, Homo sapiens
AVSGGSISSSNWWSWVRQPPGKGLEWIGEINHGGGTNYNPSLKSRVAISLATSKNQFSLKLNSVTAADTAVYYCARGGYHSTRRHPPRKRDYYMDVWGTGTTVTVSS

SEQ ID NO: 30107 - protein, 105 aa, Homo sapiens
VSGVPISGFLWTWIRQSSEKGLQWLGHIRDSGAPAFNPSLQSRLTISVDTSKNQFSLKLNSVTAADTAVYYCARGGYHSTRRHPPRKRDYYMDVWGTGTTVTVSS

SEQ ID NO: 30108 - protein, 107 aa, Homo sapiens
AVSGGSISSTNWWSWVRQSPGKGLEWIGEIYHSGTTNYNPSLKSRVTISVDKPKNQFSLKLTSVTAADTAVYYCARGGYHSTRRHPPRKRDYYMDVWGTGTTVTVSS

SEQ ID NO: 30109 - protein, 107 aa, Homo sapiens
VVSGYSITNNKWWSWVRQSPGKGLEWIGDIYHGGTTDYNPSLKSRVAISLATSKNQFSLKLNSVTAADTAVYYCARGGYHSTRRHPPRKRDYYMDVWGTGTTVTVSS

SEQ ID NO: 30110 - protein, 101 aa, Homo sapiens
ASGYTFTDYAIHWVRQAPGQRLEWMGWINAGNGDTKYSQTFQDRVTISRDTSASTAYMELSSLRSEDTAVYYCARGYCSRTSCQYYFDDYWGQGTLVTVSS

SEQ ID NO: 30111 - protein, 101 aa, Homo sapiens
ASGYTFTDYAIHWVRQAPGQRLEWMGWINAGNGDTKYSQTFHDRVTITRDTSASTTYMELSSLRSEDTAVYYCARGYCSRTSCQYYFDDYWGQGTLVTVSS

SEQ ID NO: 30112 - protein, 109 aa, Homo sapiens
TVSGDSISSTSYFWGWIRQPPGNGLEWIGSIYSSRSTYYTPSLKSRVTISVDTSKNQFFLNLSSVTAADTAVYYCVRQYCSSTSCYAKFFYRHYYMDVWGKGTTVTVSS

SEQ ID NO: 30113 - protein, 109 aa, Homo sapiens
TVSDDSISSTSYFWGWIRQPPGKGLEWIGSIYSSRSTYYTPSLKSRVTISVDTSKNQFFLNLSSVTAADTAVYYCVRQYCSSTSCYAKFFYRHYYMDVWGKGTTVTVSS

SEQ ID NO: 30114 - protein, 100 aa, Homo sapiens
AASGFTFSDYYMSWIRQAPGKGLEWVSYISRSGSSIYYAASVQGRFTISRDNAKNSLYLQMNSLRAEDTAVYYCARDRTLYDSSGYFDYWGQGTLVTVSS

SEQ ID NO: 30115 - protein, 100 aa, Homo sapiens
AASGFTFSDYYMSWIRQAPGKGLEWVSYISSGGRTIYYADSVKGRFTISRDNAKNSLYLQMNSLRAEDTAVYYCARDRTLYDSSGYFDYWGQGTLVTVSS

SEQ ID NO: 30116 - protein, 99 aa, Homo sapiens
SVSGGSISHYYWSWIRQPPGKRPEWIGYIFHSGSAKYSPTYSPSLKSRVTISVDTSENQISLKLNSVTAADTAVYYCARGWELLVLEGWGQGILVTVSS

SEQ ID NO: 30117 - protein, 99 aa, Homo sapiens
SVSGASMSHYYWSWIRQPPGKGLEWIGYIFHSGSAKYSPTYSPSLKSRVTISLDTSEKQFSLKVKSVTAADTAVYYCARGWELLVLEGWGQGILVTVSS

SEQ ID NO: 30118 - protein, 102 aa, Homo sapiens
KGSGYSFSNHWINWVRQMPGKGLEWMGRIDPSDSSTTYSPSFQGHVTISADKSISTAYLQWSSLKASDSAMYYCARRGSSGAGDFYSYMDVWGKGTTVTVSS

SEQ ID NO: 30119 - protein, 102 aa, Homo sapiens
KGSGYSFTNYWINWVRQLPGKGLEWMGRIDPSDSYTTYSPSFQGHVTISADKSISTAYLQWSSLKASDSAMYYCARRGSSGAGDFYSYMDVWGKGTTVTVSS

SEQ ID NO: 30120 - protein, 102 aa, Homo sapiens
KGSGYSFTNYWINWVRQMPGKGLEWMGRIDPSGSYTTYSPSFQGHVTISVDKSISTAYLQWSSLKASDSAMYYCARRGSSGAGDFYSYMDVWGKGTTVTVSS

SEQ ID NO: 30121 - protein, 99 aa, Homo sapiens
AASGFTFGNYAMHWVRQAPGKGLEWVAFISYDGTNKYYADSVKGRFTISRDNSKNTLYLQMNSLRAEDTAVYYCARGDSSSGVGYFQHWGQGTLVTVSS

SEQ ID NO: 30122 - protein, 98 aa, Homo sapiens
ASGFTFSNYAMHWVRQAPGKGLEWVAFVSYDGINKYYADSVKGRFTISRDNSKNMIYLEMNSLRAEDTAVYFCARGDSSSGVGYFQHWGQGTLVTVSS

SEQ ID NO: 30123 - protein, 98 aa, Homo sapiens
ASGFTFSNYAMHWVRQAPGKGLEWVAFVSYDGINKYYADSVEGRFTISRDNSKNTLSLQMNSLRAEDTAVYFCARGDSSSGVGYFQHWGQGSLVTVSS

SEQ ID NO: 30124 - protein, 102 aa, Homo sapiens
AASGFTFSQYWMSWVRQAPGKGLEWVAAIKQDGSEKYYVDSVKGRFTISRDNAKNSLFVDMNSLRAEDTAVYYCARDRYSGSYYESPTLDYWGPGALVTVSS

SEQ ID NO: 30125 - protein, 102 aa, Homo sapiens
AASGFTFSQYWMSWVRQAPGKGLEWVAAIKQDGSEKYYVDSVKGRFTISRDNAKNSLYLDMNSLRAEDTAVYYCARDRYSGSYYESPTLDYWGQGTLVTVSS

SEQ ID NO: 30126 - protein, 101 aa, Homo sapiens
TVSGGSVSSGTYYWSWIRQTPGKGLEWIAHISYRGNTNYNPSLRGRVTISVDMSKNQVCLQLSSLTAADTAVYYCGRSDRRDTSFVEFDYWGQGTLVTVSS

SEQ ID NO: 30127 - protein, 101 aa, Homo sapiens
TVSGGSVSSGTYYWSWIRQPPGKGLEWIAHISYRGNTNYNPSLRGRVTISVDTSKNQVCLQLSSVTAADTAVYYCGRSDRRDTSFVEFDYWGQGTLVTVSS

SEQ ID NO: 30128 - protein, 94 aa, Homo sapiens
AASGFILSSHDMHWVRRAAGKGLEWVSGIGIAGNIHYSGSVKGRFTISRESAKNSLYLQMNSLRAGDTAVYYCVRVFLNGFDIWGQGTMVTVAS

SEQ ID NO: 30129 - protein, 94 aa, Homo sapiens
AASGFILSSYDMHWVRRAAGKGLEWVSGIGIAGNIHYSGSVKGRFTISRESAKNSLYLQMNSLRAGDTAVYYCVRVFLNGFDIWGQGTMVTVAS

SEQ ID NO: 30130 - protein, 99 aa, Homo sapiens
VSDGSISRYYWSWIRQPPGQRLEWIGFVYYTGSTTYNPSLESRVTMSIETSNNQFSLRLTSVTAADTAVYYCARGGDNSGSWNDAFDIWGQGTMVTVSS

SEQ ID NO: 30131 - protein, 100 aa, Homo sapiens
TVSGGSISSYYWSWIRQSPGKGLEWIGFVYHTGSTTFNPSLESRATISVHTSKNQFSLKLTSVTAADTAVYYCARGGDNSGSWNDAFDIWGQGTMVSVSS

SEQ ID NO: 30132 - protein, 97 aa, Homo sapiens
TVSGGSISRGNYYWAWIRQPPGKGLEWIGSLYYTGSTLRNPSLQSRVTISGDTSKNQFSLKLNSVTAADTAVYYCARRDYRAWIDPWGQGTLVTVSS

SEQ ID NO: 30133 - protein, 97 aa, Homo sapiens
TVSGGSISSGNYYWAWIRQPPGKGLEWIGSLYYSGSTSRNPSLQSRVTISGDTSKNQFSLKLSSVTAADTAIYYCARRDYRAWIDPWGQGTLVTVSS

SEQ ID NO: 30134 - protein, 102 aa, Homo sapiens
AASGFTFSSYAMSWVRQNPGKGLEWVSVISGSGDKTYYSDSVKGRFTISRENSKDTLYLQMSSLRAEDTAVYYCAKGSSSNYYGAGGLDDNWGQGTLVTVSS

SEQ ID NO: 30135 - protein, 102 aa, Homo sapiens
AASGFTFSSYAMSWVRQNPGKGLEWVSVISGNGDRTYYSDSVKGRFTISRENSKDTLYLQMSSLRAEDTAVYYCAKGSSSNYYGAGGLDDNWGQGTLVTVSS

SEQ ID NO: 30136 - protein, 92 aa, Homo sapiens
ASGYTFSSFIISWVRQAPGQRLEWMGWINPGNGDTRYSQKFQGRVTINRDTSATTVYMELSSLTSEDTAVYYCARRGFFDIWGQGTMVTVSS

SEQ ID NO: 30137 - protein, 92 aa, Homo sapiens
ASGYTFTSFIISWVRQAPGQRLEWMGWINPGNGDTKYSQKFQGRVTINRDTSATTVYMELSSLTSEDTAVYYCARRGFFDIWGQGTMVTVSS

SEQ ID NO: 30138 - protein, 96 aa, Homo sapiens
TVSGGSINTYYWSWIRQPPGKGLEWIAWIHYSGNTNYNPSLKSRVTISVDTSKNQFSLKLNSVTAADTAVYYCARGGASSQPFHHWGQGTLVTVSS

SEQ ID NO: 30139 - protein, 96 aa, Homo sapiens
TVSGGSINTYYWSWIRQSPGKGLEWIAWIYYSGNTNYNPSLKSRVTISVDTSKNQFSLKLNSVTAADTAVYYCARGGASSQPFHHWGQGTLVTVSS

SEQ ID NO: 30140 - protein, 105 aa, Homo sapiens
TVSGGSITSGGNYWSWIRQHPGKGLEWIGYIYNRGNSYSNPSLKSRVTISLDTSKNQFSLRLRSVTAADTAVYYCARDKRQFAGELSSPHWFDPWGQGTLVTVSS

SEQ ID NO: 30141 - protein, 105 aa, Homo sapiens
TVSGGSISSGGNYWSWIRQHPGKGLEWIGYIYNRGTTSYNPSLKSRITISVDTSKNQFSLKMRSVTAADTAVYYCARDKRQFAGELSSPHWFDPWGQGTLVTVSS

SEQ ID NO: 30142 - protein, 106 aa, Homo sapiens
KGSGYSFANYWIVWVRQMPGKGLEWMGIIYPGDSDTRYSPSFQGQVTISADKSTSTSYLQWSSLKASDTAMYYCARENYDGSAYYPSFSYYYMDVWGNGTTVTVSS

SEQ ID NO: 30143 - protein, 106 aa, Homo sapiens
KGSGYSFANYWIVWVRQMPGKGLEWMGIIYPGDSDTRYSPSFQGQVTISADKSTSTSYLQWSSLKASDTAMYYCARENYDGSAYYPSFSYYYMDVWGKGTTVTVSS

SEQ ID NO: 30144 - protein, 96 aa, Homo sapiens
AASGFTFSNYAMNWVRQAPGKGLEWVSAITPSGGNTYYADSVKGRFTVSRDNSKNTLHLQVNSLRADDTAVYSCAKAGDHSYFDYWGQGTLVTVSS

SEQ ID NO: 30145 - protein, 96 aa, Homo sapiens
AASGFTFSNYAMSWVRQAPGKGLEWVSAITASGGSTYYADSVKGRFTVSRDNSKSTLHLQVNSLRAEDTAVYYCAKAGDHSYFDYWGQGTLVTVSS

SEQ ID NO: 30146 - protein, 103 aa, Homo sapiens
AASGFTFSRSWMSWVRQAPGKGLEWVANIKQDGSEKYYVDSVKGRFTISRDNVENSLFLQMNNLRAEDTAVYYCARFFGVVRFQATGGWFGPWGQGTLVTVSS

SEQ ID NO: 30147 - protein, 103 aa, Homo sapiens
AASGFTFSRSWMSWVRQALGKGLEWVANIKQDGSEKYYVDSVKGRFTISRDNVENSLFLQMNNLRAEDTAVYYCARFFGVVRFQATGGWFGPWGQGTLVTVSS

SEQ ID NO: 30148 - protein, 103 aa, Homo sapiens
AASGFTFSRSWMSWVRQAPGKGLEWVANIKQDGSEKYYVDSVEGRFTISRDNVEDSVFLQMNSLRAEDTAVYYCARFFGVVRFQATGGWFGPWGQGTLVTVSS

SEQ ID NO: 30149 - protein, 101 aa, Homo sapiens
TVSGDSMHNGDYYWTWLRQSPGKGLEWIGYIYNSGSTYYNPSLDRRVFISEDTSRNQFSLSLSSVTAADTAVYYCARLHGPNSWTPYYFDRWGQGTLVAVS

SEQ ID NO: 30150 - protein, 101 aa, Homo sapiens
TVSGDSMNNGDYYWTWLRQSPGKGLEWIGYIYNSGSTYYNPSLERRVFISEDTSRNQFSLSLSSVTAADTAVYYCARLHGPNSWTPYYFDRWGQGTLVAVS

SEQ ID NO: 30151 - protein, 102 aa, Homo sapiens
TVSGDSMSNGDYYWTWLRQTPGKGLEWIGYIYKSGTTYFNPSLGSRAFISEAASTNQFSLRLDSVTASDSALYYCARLHGPNSWTPYYFDRWGPGTLVAVSS

SEQ ID NO: 30152 - protein, 107 aa, Homo sapiens
AASGLSFSGSEMIWVRQAPGKGLEWVSYITSAGSNIYYADSVKGRFTISRDNAKSSLYLQMNSLRAEDTAVYYCARGARLTKVETSTMIQVEAFDIWGQGTIVTVSS

SEQ ID NO: 30153 - protein, 107 aa, Homo sapiens
AASGFAFSASEMIWVRQAPGKGLEWVSYITRAGSNIYYADSVKGRFTISRDNAKNSLYLQMNSLRAEDTAVYYCARGARLTKVETSTMIQVEAFDIWGQGTIVTVSS

SEQ ID NO: 30154 - protein, 102 aa, Homo sapiens
EASGFTFSDYYMSWIRQAPGKGLQWLSYISTSGSSTNYADSVKGRFTISRDNAKNSLSLHMDSLRAEDTAVYYCARDLSTYGGNSVFAFDIWGQGTMVTVSS

SEQ ID NO: 30155 - protein, 102 aa, Homo sapiens
AASGFTFSDYFMSWIRQAPGKGLEWVSYISDSGGNTNYAGSVKGRFTISRDNVKNSLYLQMNSLRADDTAVYYCARDLSTYGGNSVFAFDIWGQGTMVTVSS

SEQ ID NO: 30156 - protein, 102 aa, Homo sapiens
AASGFTFSDSYMSWVRQAPGKGLEWVSYISSSGTDTKYADSVKGRFTISRDNAKNSLYLQMDSLRAEDTAVYYCARDLSTYGGNSVFAFDIWGQGTMVTVSS

SEQ ID NO: 30157 - protein, 102 aa, Homo sapiens
AASGFTFSDSYMSWVRQAPGKGLEWVSYISSSATDTKYADSVKGRFTISRDNAKNSLYLQMDSLRAEDTAVYYCARDLSTYGGNSVFAFDIWGQGTMVTVSS

SEQ ID NO: 30158 - protein, 102 aa, Homo sapiens
AASGFTFSDSYMSWVRQAPGKGLEWVSYISSSGSDTKYADSVKGRFTISRDNAKNSLYLQMDSLRAEDTAVYYCARDLSTYGGNSVFAFDIWGQGTMVTVSS

SEQ ID NO: 30159 - protein, 100 aa, Homo sapiens
AASAFIFSSNTMNWVRQAPGKGLEWVSSISGSSGYIYYADSVKGRFTISRDNAKNSLYLQMNSLRAEDTAVYYCARVPSNWNYGGYFDYWGQGTLVTVSS

SEQ ID NO: 30160 - protein, 100 aa, Homo sapiens
AASGFTFSSYSMNWVRQAPGKGLEWVSSISSGSGYIYYADSVKGRFTISRDNAKNSLYLQMNSLRAEDTAVYYCARVPSNWNYGGYFDYWGQGTLVTVSS

SEQ ID NO: 30161 - protein, 100 aa, Homo sapiens
AASGFTFSSYSMNWVRQAPGKGLEWVSSISSGSGYIYYADSVKDRFTISRDNAKNSLYLQMNSLRAEDTAVYYCARVPSNWNYGGYFDYWGQGTLVTVSS

SEQ ID NO: 30162 - protein, 104 aa, Homo sapiens
AASGFTFSPHEMNWVRLAPGKGLEWVSYISGSGDTILYADSVEGRFTISRDNAKNSLYLQMGSLRAEDTGFYYCARGGFCSPTLCYNLNAFDIWGQGTMVTVSS

SEQ ID NO: 30163 - protein, 104 aa, Homo sapiens
AASGFTFSPHEMNWVRQAPGKGLEWVSYISGSGDTILYADSVEGRFTISRDNAKNSLYLQMDSLRAEDTAFYYCARGGFCSPTLCYNLNAFDIWGQGTMVTVSS

SEQ ID NO: 30164 - protein, 101 aa, Homo sapiens
VSGGSLSSASYYWSWIRQPPGKGLEWIGYIYYSGSTNYNPSLKSRVTISVDTSKNQFSLKLSSVTAADTAVYYCTRDDRRPYSLQYYTDVWGKGTTVTVSS

SEQ ID NO: 30165 - protein, 101 aa, Homo sapiens
VTGGSLSSASYYWSWIRQPPGKGLEWIGYIYYSGSTNYNPSLKSRVTMSVDMSKNQFSLKLTSVTAADTAVYYCTRDDRRPYSLQYYTDVWGQGTTVTVSS

SEQ ID NO: 30166 - protein, 92 aa, Homo sapiens
ATSGFAFSVYTMNWVRQAPGKGLECVASIKHDGRDRYYVDSVRGRFTISRDNARSSVYLQMNSLRVEDTAVYYCMRGRGGRRGQGTLVTVSS

SEQ ID NO: 30167 - protein, 92 aa, Homo sapiens
ATSGFSFSAYTMNWVRQAPGKGLESVANIKQDGSEKYYVDSVKGRFTISRDNAKNSVYLQMNSLRAEDTAVYYCMRGRGGRRGQGTLVTVSS

SEQ ID NO: 30168 - protein, 99 aa, Homo sapiens
AASGFTFSDYWMHWVRQAPGKGLVWVSRVKGDGRESSYADSVKGRFTISRDNAKNTLYLQMNSLRVEDTAVYFCGRVPVARPGIGIDYWGQGTLVTVSS

SEQ ID NO: 30169 - protein, 99 aa, Homo sapiens; identical to SEQ ID NO: 30168

SEQ ID NO: 30170 - protein, 99 aa, Homo sapiens; identical to SEQ ID NO: 30168

SEQ ID NO: 30171 - protein, 98 aa, Homo sapiens
SASGFIFSPYALHWVRQAPGKGLEYVGVVYADGTSTYYAESMRGRFTISRDNSEKTLYLQMTSLRVDDTAVYYCVKGGDLPTRPFDHWGQGTPVIVSS

SEQ ID NO: 30172 - protein, 97 aa, Homo sapiens
GSGFLFSTHALHWVRQAPGKGLEYVGVVYADGTSTYYADSVRHRFTVSRDNSKKTLYLEMTSLRPEDTALYYCVKGGDLPTRPFDHWGQGTPVTVSS

SEQ ID NO: 30173 - protein, 99 aa, Homo sapiens
KGYGYSFPTYWIGWVRQMPGKGLEWMGMIYPGDSDARYSPSFQGRVTFSADKSTSTVYLQWSSLKASDTAMYYCARLQQSSPNSYGDSWGQGTLVTVSS

SEQ ID NO: 30174 - protein, 99 aa, Homo sapiens
KGYGYSFPTYWIGWVRQMPGKGLEWMGMIYPGDSDARYSPSFQGRVTFSADKSTDTVFLQWSSLKASDTAMYYCARLQQSSPNSYGDSWGQGTLVTVSS

SEQ ID NO: 30175 - protein, 97 aa, Homo sapiens
ASGYTFSNYAMHWVRLAPGQRLEWMGWISAGNIKTKYSPKFQGRVTITGDTSASTAYMELSNLGSEDTAVYYCARVGNNGWNVFDIWGQGTMVTVSS

SEQ ID NO: 30176 - protein, 97 aa, Homo sapiens
ASGYTFSNYAMHWVRLAPGQRLEWMGWINAGNIKTKYSPKFQGRVTITGDTSASTAYMELSSLLSEDTAVYYCARVGNNGWNVFDIWGQGTIVTVSS

SEQ ID NO: 30177 - protein, 116 aa, Homo sapiens
KGSGYTFTTYWIGWVRQMPGKGLEWMGIIFPADSDTIYSPSFQGQVTISADISINTAYLQWTSLKASDTAMYFCARRGIAENYDILSGYYWTRSRAAEYFYHMDVWGTGTMVTVSS

SEQ ID NO: 30178 - protein, 116 aa, Homo sapiens
KGSGYTFTTYWIGWVRQMPGKGLEWMGIIFPGDSDTIYSPSFQGQVTISADISINTAYLQWTSLKASDTAMYFCARRGIAENYDILSGYYWTRSRAAEYFYHMDVWGTGTMVTVSS

SEQ ID NO: 30179 - protein, 100 aa, Homo sapiens
SGGSFNDYGINWVRQAPGQGLEWMGRIIPVLGTGTPAQRFQGRLTITADKSTNTAYMELSSLRSEDTATYYCARDQGIVEGILISIFDYWGQGTPVTVSS

SEQ ID NO: 30180 - protein, 100 aa, Homo sapiens
SGGSFSDYGINWVRQAPGQGLEWMGRIIPILGTGTPAQRFQGRLTITADKSTSTAYMELSSLRSEDTAIYYCARDQGIVEGILISIFDYWGQGTPVTVSS

SEQ ID NO: 30181 - protein, 97 aa, Homo sapiens
AVSGGSMNSNDYSWSWIRRPPGKGLECLGYIYRSGSAYYSPSLKSRVNMSIDRSKNQFSLELKSVTAADTAVYYCARRLRPYYFDSWGQGTLVTVSS

SEQ ID NO: 30182 - protein, 97 aa, Homo sapiens; identical to SEQ ID NO: 30181

SEQ ID NO: 30183 - protein, 98 aa, Homo sapiens
KGSGYSFRSYWIGWVRQMPGKGLEWMGIIYPGDSKTTYSPSFQGQVTISVDKSISTAYLQWTSLKASDTAMYYCARRSNSWYGGFDPWGQGTLVTVSS

SEQ ID NO: 30184 - protein, 97 aa, Homo sapiens
GSGYSFRSYWIGWVRQMPGKGLEWMGIIYPGDSKTTYSASFQGQVTFSVDKSISTAYLQWTSLKASDTAVYYCARRSNSWYGGFDPWGQGTLVTVSS

SEQ ID NO: 30185 - protein, 111 aa, Homo sapiens
TQTLTLTCTFSGFSLSTSGVGVGWVRQPPGKALEWVAQIYWDDDKRYNPSLRSRLTITKDTSRNQVTLTMTNMDPVDTATYYCAHRLTSRYDWNSGIYDPWGQGTLVTVSS

SEQ ID NO: 30186 - protein, 111 aa, Homo sapiens; identical to SEQ ID NO: 30185

SEQ ID NO: 30187 - protein, 111 aa, Homo sapiens
TQTLTLTCTFSGFSLTTSGVGVGWVRQPPGKALEWVAQIYWDDDKRYNPSLRSRLTITKDTSRNQVTLTMTNMDPVDTATYYCAHRLTSRYDWNSGIYDPWGQGTLVTVSS

SEQ ID NO: 30188 - protein, 96 aa, Homo sapiens
ASGGTFSSYAISWVRQGPGQGLEWMGGIIPMFDTANYAQKFQGRVTITADESRSTAYMELSSLRSEDTAVYYCASAPGIAVWFDPWGQGTLVTVSS

SEQ ID NO: 30189 - protein, 96 aa, Homo sapiens
ASGGTFSSYVISWVRQGPGQGLEWMGGIIPMFDTANYAQKFQGRVTITADESRSTAYMELTSLRSDDTAVYYCASAPGIAVWFDPWGQGTLVTVSS

SEQ ID NO: 30190 - protein, 100 aa, Homo sapiens
TVSGGSISSSPYFWGWIRQPPGEGLEWIASIMYRGNTEYNPSLKSRVTISVDTSRNQFSLKLRSVTAADTSVYYCARLSDYDSNRWFDAWGQGTLVTVSS

SEQ ID NO: 30191 - protein, 100 aa, Homo sapiens
TVSGGSISSSPYFWGWIRQPPGEGLEWIASILYRGNTEYNPSLKSRVTISVDTSRNQFSLKLRSVTAADTSVYYCARLSDYDSNRWFDAWGQGTLVTVSS

SEQ ID NO: 30192 - protein, 101 aa, Homo sapiens
SVSGDSISNTNYYWGWIRQSPVTGLEWIGSVFYTGLTYSNPNFKSRITLSADTSKNQFSLSLASVTAADTALYFCARHVAPGAKPYFFDHWGRGTLVTVSS

SEQ ID NO: 30193 - protein, 101 aa, Homo sapiens
SVSGDSITTTNYYWGWVRQSPVTGLEWIGSVFYTGLTYTNPNFKSRITVSADTSTNQFSLSLASVTATDTALYFCARHVAPGAKPYFFDHWGRGTLVTVSS

SEQ ID NO: 30194 - protein, 105 aa, Homo sapiens
ATGFSFSGYAMTWVRQAPGKGLEWVSTISGNAETTYYSASVRGRFTISRDNSKNTLYLQLSSLRAEDAAIYYCTKTSRGSCSSVRCFLNWHFDVWGRGALVTVSS

SEQ ID NO: 30195 - protein, 105 aa, Homo sapiens; identical to SEQ ID NO: 30194

SEQ ID NO: 30196 - protein, 95 aa, Homo sapiens
AASGFTFQNYWMLWVRQAPGKGLEWVASIKTDGSQELYADSVKGRFTISRDNAKNSLFLQLDSLRADDTALYYCARDFSWSWEYWGQGTRVTVSS

SEQ ID NO: 30197 - protein, 95 aa, Homo sapiens
VASGFTFKNNWMLWVRQAPGKGLEWVASIKHDGSQELYADSVKGRFTISRDNAKNSLFLQLDSLRADDTAIYYCARDFSWSWEYWGQGTRVTVSS

SEQ ID NO: 30198 - protein, 95 aa, Homo sapiens
AASGFTFKNYWMLWVRQAPGKGLEWVASIKDDGSQELYADSVKGRFTISRDNSKNSLFLQLDSLRADDTALYYCARDFSWSWEYWGQGTRVTVSS

SEQ ID NO: 30199 - protein, 99 aa, Homo sapiens
AASGFTFSTYWMHWVRQAPGKGLVWVSRIYDDESGTSYADSVKGRFTISRDNAKNTVYLQMNSLRAEDTGVYYCARAPTYNSGTGCDYWGQGTLVTVSS

SEQ ID NO: 30200 - protein, 99 aa, Homo sapiens
AASGFTFSTYWMHWVRQAPGKGLVWVSRIYDDGSGTTYADSVKGRFTISRDNAKNTVYLQMNSLTAEDTAVYYCARAPTYNSGTGCDYWGQGTLVTVSS

SEQ ID NO: 30201 - protein, 101 aa, Homo sapiens
AASGFSFSSYYMNWVRQAPGKGLEWVSYISSDNSSRNYADSVRGRFTVSRDNAKNSLFLQMNSLRDEDTAVYYCARGFGDYWTQRHYFDYWGQGTLVTVSS

SEQ ID NO: 30202 - protein, 101 aa, Homo sapiens
AASGLSFSNYNMNWVRQAPGKGLEWVSDISSSSSTIYYADSVKGRFTISRDNAKNSLYLQMNSLRDEDTAVYYCARGFGDYWTQRHYFDYWGRGTLVTVSS

SEQ ID NO: 30203 - protein, 101 aa, Homo sapiens
AASGFSFSNYYMNWVRQAPGKGLEWVSYISSDNISRNYADSVRGRFTVSRDNAKNSLFLQMNSLRDEDTAVYYCARGFGDYWTQRHYFDYWGQGTLVTVSS

SEQ ID NO: 30204 - protein, 99 aa, Homo sapiens
TVSGGPIGVYHWSWIRQPPGQGLEWIGFAHYTGDTNYNPSLRNRLSLSLDTSKKQLSLQLHSVTAADTAVYYCARVHWVGGAWLRIDPWGQGTLVTVSS

SEQ ID NO: 30205 - protein, 98 aa, Homo sapiens
SFSGGPVIPYHWSWIRRPPGQGLEWIGFAHYTGDTNYNPSLRNRVSLSLDTSRKQLSLQLHSVTAADTAVYYCARVHWVGGAWLRIDPWGQGALVTVS

SEQ ID NO: 30206 - protein, 97 aa, Homo sapiens
TVSGGPIGVYHWSWIRQPPGQGLEWIGFAHYTGDTNYNPSLRNRVSLSLDTSKKQLSLQLHSVTAADTAVYYCARVHWVGGAWLRIDPWGQGTLVTV

SEQ ID NO: 30207 - protein, 98 aa, Homo sapiens
AASGFTFSNSGMHWVRQAPGKGLEWVSFMSSDGSIKYYAGSVKGRFTISRDNSENTLYLQMNGLRPEDTAAYYCAKDIASSYFYMDVWGKGTTVSVSS

SEQ ID NO: 30208 - protein, 98 aa, Homo sapiens; identical to SEQ ID NO: 30207

SEQ ID NO: 30209 - protein, 98 aa, Homo sapiens
AASGFTFSNSGMHWVRQAPGKGLEWVSFMSYDGSIKYYAGSVKGRFTISRDNSENTLYLQMNSLRPEDTAAYYCAKDIASSYFYMDVWGKGTTVTVSS

SEQ ID NO: 30210 - protein, 101 aa, Homo sapiens
TSSGFTFGDYAMSWVRQAPGKGLEWVGLIRSKAYGGTTQYAASVKGRFTISRDDSKSIAYLQMNSLKTEDTAVYFCSREVVPTSLDAFDVWGQGTMVTVSS

SEQ ID NO: 30211 - protein, 101 aa, Homo sapiens
TSSGFTFGDYAMTWVRQAPGKGLEWVGLIRSKAYGGTTQYAASVKGRFTISRDDSKSIAYLQMNSLKTEDTAVYFCSREVVPTSLDAFDVWGQGTMVTVSS

SEQ ID NO: 30212 - protein, 97 aa, Homo sapiens
AASGFTFSNSYMHWVRQAPGQGLVWVSHINSDGTSTSYVDSVKGRFTISRDNAKNTLYLQMNSLRAEDTALYYCVSGYCSGSRCFYWGQGTLVTVSS

SEQ ID NO: 30213 - protein, 97 aa, Homo sapiens
VVSGFTFSSSYMHWVRQAPGKGLVWVSHIISGGAGTSYADSVKGRFTISRDNAKNTLYLEMNSLRPEDTAVYYCVSGYCSGSRCFYWGQGTLVTVSS

SEQ ID NO: 30214 - protein, 95 aa, Homo sapiens
VSGGSITTYYWTWIRQPPGMGLEFIGYIFHTGHTNYNSSLEHRVAMSVDTSKNQISLTLTSVTAADTAMYYCGAYSGSSQAIDIWGHGTMVSVSS

SEQ ID NO: 30215 - protein, 95 aa, Homo sapiens; identical to SEQ ID NO: 30214

SEQ ID NO: 30216 - protein, 93 aa, Homo sapiens
AASGFSFSSQRMSWVRQAPGKGLEWLANINEDGGEKHYADSVKGRFTISRDNAEQSLSLQLSSLRVDDTAIYYCVNRGWLEFWGPGVQVTVSS

SEQ ID NO: 30217 - protein, 93 aa, Homo sapiens
AASGFSFSTYWMSWVRQAPGKGLEWVASINEAGSDKYYVDSVKGRFTISRDNAKNSLYLQMDSLRAEDTAVYYCVNRGWLEFWGQGTLVTVSS

SEQ ID NO: 30218 - protein, 98 aa, Homo sapiens
TVSGGSLMSGASYWGWIRQHPGKGLEWIGSIYYSGSTYYNPSLKSRLTMSLDTSKNQFSLNLTSVTGADTAVYYCARLRGRLGACDPWGQGTLVTVSS

SEQ ID NO: 30219 - protein, 98 aa, Homo sapiens
NVSGVSIISGAYYWGWLRQPPGKGLEWVGSIYYNGNTYYNPSLKSRLALSVDTSKNQFSLNLTSVTAADTAFYYCARLRGRLGACDPWGQGTLVTVSS

SEQ ID NO: 30220 - protein, 101 aa, Homo sapiens
AASGFTFSDYYMSWIRQAPGKGLEWVSYISSSGSTIYYADSVKGRFTISRDNAKNSLYLQMNSLRAEDTAMYYCARGAGRIAAAGTLGGYWGQGTLVTVSS

SEQ ID NO: 30221 - protein, 101 aa, Homo sapiens
AASGFTFSDYYMSWIRQAPGEGLEWVSYISSSGSTMYYADSVKGRFTISRDNAKNSLYLQMNSLRAEDTAVYYCARGAGRIAAAGTLGGYWGQGTLVTVSS

SEQ ID NO: 30222 - protein, 96 aa, Homo sapiens
AASGFTFSGHWMHWVRRIPGKGPVWVSRINNDGTSTTYADSVKGRFTMSRDNVKNTIYLQMHSLRVEDTALYICTRGDYPNWLDSWGPGTLVTVSS

SEQ ID NO: 30223 - protein, 96 aa, Homo sapiens
AASGFSFSGHWMHWVRRIPGKGPVWVSRINNDGTSTTYADSVKGRFTMSRDNVKNTIYLQMHSLRVEDTALYICTRGDYPNWLDSWGPGTLVTVSS

SEQ ID NO: 30224 - protein, 96 aa, Homo sapiens
AASGFTFSSYAMNWVRQAPGKGLEWVSYISSTGSTIYYADSVMGRFTISRDNAKNSLYLQMNSLRADDTAVYYCAGEYANTEHDYWGQGTLVTVSS

SEQ ID NO: 30225 - protein, 96 aa, Homo sapiens; identical to SEQ ID NO: 30224

SEQ ID NO: 30226 - protein, 96 aa, Homo sapiens
AASGFSFSGYWMNWVRQAPGKGLEWVANIKPDGSEKFYLDSVKGRFTISRDNAKNSLYLQMNSLRVEDTAVYYCTRYGVTAGLDYWGQGTLVTVSS

SEQ ID NO: 30227 - protein, 96 aa, Homo sapiens
AASGFRFSDYWMSWVRQVPGKGLEWVANIKPDGSGKFYLDSVKGRFTISRDNAKNSLYLQMNSLRVEDTAVYYCTRYGVTAGLDYWGQGTLVTVSS

SEQ ID NO: 30228 - protein, 96 aa, Homo sapiens; identical to SEQ ID NO: 30226

SEQ ID NO: 30229 - protein, 96 aa, Homo sapiens
AASGFTFSKCWMHWVRQAPGKGLVWVSRINSDGSSTSYADSVKGRFTISRDNAKNTLYLQMNSLRAEDTAVYYCARGLGKRSLDYWGQGTLVTVSS

SEQ ID NO: 30230 - protein, 96 aa, Homo sapiens
AASGFTFSNCWMHWVRQAPGKGLVWVSRINSDGSSTSYADSVKGRFTISRDNAKNTLYLQMNSLRAEDTAVYYCARGLGKRSLDYWGQGTLVTVSS

SEQ ID NO: 30231 - protein, 101 aa, Homo sapiens
VASGFTFSSYGMHWVRQAPGKGLEWVAVISYDENNKLYADSVKGRFTISRDNSKNTLYLQMNSLRAEDTAVYHCAKAPYRDGFGNYYFDYWGQGTLVIVSS

SEQ ID NO: 30232 - protein, 101 aa, Homo sapiens
VASGFTFSTYGMHWVRQAPGKGLEWVAVISYDGGNKLYADSVKGRFTISRDNSKNTLYLQMNSLRAEDTAVYHCAKAPYRDGFGNYYFDYWGQGTLVIVSS

SEQ ID NO: 30233 - protein, 101 aa, Homo sapiens
VASGFSFSSYGMHWVRQAPGKGLEWVAVISYDGSNTLYADSVKGRFTISRDNSKNTLYLQMNSLRAEDTAVYHCAKAPYRDGFGNYYFDYWGQGTLVIVSS

SEQ ID NO: 30234 - protein, 99 aa, Homo sapiens
AVSGITFSNFWMYWVRQVPGKGLAWVSRINSDGSITDYADSVKGRFTISRDNAKKTVYLQMNSLRADDTAVYFCARWAMMRGNDYFDYWGQGTLVTVTS

SEQ ID NO: 30235 - protein, 99 aa, Homo sapiens
AVSGITFSNFWIYWVRQVPGKGLVWVSRINSDGSVTDYADSVKGRFTISRDNAKKTVYLQMNSLRADDTAVYFCARWAMMRGNDYFDYWGQGTLVTVTS

SEQ ID NO: 30236 - protein, 105 aa, Homo sapiens
AVSGFTFSSYSMNWVRQAPGRGLEWVSSISSSGSYIYYADSVKGRFAISRDNAENSLYLQMNNLRAEDTAVYYCARDHFYDRSGYGLATDPLDYWGQGTLVTVSS

SEQ ID NO: 30237 - protein, 105 aa, Homo sapiens
AVSGFTFSSYSMNWVRQAPGRGLEWVSSISSSGSYIYYADSVKGRFAISRDNAENSLYLQMSNLRAEDTAVYYCARDHFYDRSGYGLATDPLDYWGQGTLVTVSS

SEQ ID NO: 30238 - protein, 105 aa, Homo sapiens; identical to SEQ ID NO: 30237

SEQ ID NO: 30239 - protein, 99 aa, Homo sapiens
AASGFNFGVNDMHWVRQAPGKGLEWVSSINWNSAGTAYADSVKGRFTISRDNFKNMLFLQMKNLREEDTALYYCAKDSRQYRHGIMDAWGRGTTVTVSS

SEQ ID NO: 30240 - protein, 99 aa, Homo sapiens
AASGFNFGVNDMHWVRQAPGKGLEWVSSINWNSAGTAYADSVKGRFTISRDNFKNMLFLQMNNLREEDTALYYCAKDSRQYRHGIMDAWGRGTTVTVSS

SEQ ID NO: 30241 - protein, 96 aa, Homo sapiens
AASGFTFSTYWMSWVRQAPGTGLEWVANIKEDGSEKYYVDSVKGRFTIFRDNAKNSLYLQMNSLRAEDTAVYYCARDHGGYWYLDLWGRGTLVTVS

SEQ ID NO: 30242 - protein, 96 aa, Homo sapiens
AASGFTLSSYWMSWVRQAPGKGLEWVANIKEDGSEKYYVDSVKGRFTISRDNAKNSLYLQMNSLRAEDTAVYYCARDHGGYWYLDLWGRGTLVTVS

SEQ ID NO: 30243 - protein, 96 aa, Homo sapiens
AASGFTFSSYWMSWVRQAPGKGLEWVANIREHGSEKYYVDSVKGRFTIFRDNAKNSLYLQMNSLRAEDTAVYYCARDHGGYWYLDLWGRGTLVTVS

SEQ ID NO: 30244 - protein, 98 aa, Homo sapiens
SGYTFTSYGISWVRQAPGQGLEWMGWISTYNGNTETAQNFQGRLSMATETSTTTAYMELRSLTSDDTAVYYCARVGGRATVVTPQDHWGQGTLVAVSS

SEQ ID NO: 30245 - protein, 98 aa, Homo sapiens
SGYTFTSYGISWVRQAPGQGLEWMGWISTYNGNTETAQNFQGRVSMTTETSTTTAYLELRSLTSDDTAVYYCARVGGRATVVTPQDHWGQGTLVAVSS

SEQ ID NO: 30246 - protein, 100 aa, Homo sapiens
AASGFTFSSYAMHWVRQAPGKGLEYVSAISSDGDNTYYANSVKGRFRISRDNSKNTLYLQMGNLRTDDMAIYFCARGGVVVVTAAMVDYWGQGTLVTVSS

SEQ ID NO: 30247 - protein, 100 aa, Homo sapiens; identical to SEQ ID NO: 30246

SEQ ID NO: 30248 - protein, 98 aa, Homo sapiens
AVSGDSISSISWWSWVRQPPGKGLEWVAAIYHSGNTNYNPSLGGRVTISLDKSNNHFSLTLNSVTDADTAVYFCARESRDWNGLFDYWGQGIQVTVSS

SEQ ID NO: 30249 - protein, 98 aa, Homo sapiens; identical to SEQ ID NO: 30248

SEQ ID NO: 30250 - protein, 104 aa, Homo sapiens
AASGLTVSSNYMSWVRQAPGKGLEWVSVIYRDGTTYDADSVKGRFTISRDNSKNTVYLQMNSLRVEDTAVYYCARDVSEFSQYGGSYYYYMDVWGKGTTVTVSS

SEQ ID NO: 30251 - protein, 104 aa, Homo sapiens
AASGLTVSSNYMSWVRQAPGKGLEWVSVVYRDGTTYDADSVKGRFTISRDISKNTVYLQMNSLRVEDTAVYYCARDVSEFSQYGGSYYYYMDVWGKGTTVTVSS

SEQ ID NO: 30252 - protein, 101 aa, Homo sapiens
VASGFNFHVHGMHWVRQAPGKGLEWVATIWYDGSNQHYADSVKGRFTISRDNSQKSLYLQMNSLRPEDTAVYYCARDFNTATTYYYYMDVWGKGTTVTVSS

SEQ ID NO: 30253 - protein, 101 aa, Homo sapiens
VASGFNFNVHGMHWVRQAPGKGLEWVATVWYDGSKQDYADSVKGRFTISRDNSQKSLFLQMNSLRPEDTAVYYCARDFNTATTYYYYMDVWGEGTTVTVSS

SEQ ID NO: 30254 - protein, 98 aa, Homo sapiens
AASGFTFSSYEMNWVRQAPGKGMEWLSYISSSGATMYYSDSVKGRFTISRDNAENSLYLQMNSLRAEDTAIYYCAREGEYNSGHFDYWGQGTLVTVSS

SEQ ID NO: 30255 - protein, 98 aa, Homo sapiens
AASGFIFSSHEMNWVRQAPGKGLEWVSYIDNSGSTIYYGDSVRGRFTVSRDNTKNSLYLQMNSLRIEDTAVYYCAREGEYNSGHFDYWGQGTLVTVSS

SEQ ID NO: 30256 - protein, 98 aa, Homo sapiens
AASGFTFSSYEMNWVRQAPGKGMEWLSYISSGGTTIYYADSVKGRFTISRDNAENSLYLQMNSLRAEDTAVYYCAREGEYNSGHFDYWGQGTLVTVSS

SEQ ID NO: 30257 - protein, 98 aa, Homo sapiens
SGFTLDDFYISWIRQAPGKGLEWVSYISGGGSHIKYADSVRGRFTISRDNDEKLVHLHMKSLRAEDTAMYYCAREDKRGHDSDWYDPWGQGTLVIVSS

SEQ ID NO: 30258 - protein, 100 aa, Homo sapiens
AASGFTFSDFYMSWIRQAPGKGPEWVSYISGGGTHIKYADSVWGRFTISRDNDKNSLYLQMNSLTADDTAIYYCAREDKRGHDSDWYDPWGQGTLVTVSS

SEQ ID NO: 30259 - protein, 100 aa, Homo sapiens
EASGFTFSDFYMSWIRQTPGKGPEWVAYISGGGTHIKYADSVWGRFTISRDNDKNSLYLQMKSLTVDDTAIYYCAREDKRGHDSDWYDPWGQGTLVTVSS

SEQ ID NO: 30260 - protein, 100 aa, Homo sapiens
ALSGFTLEDFYISWIRQAPGKGLEWVAYISGGGSHIKYADSVRGRFVISRDNYETSVYLQMNNLRDDDTAVYYCAREDKRGHDSDWYDPWGRGTQVVVSS

SEQ ID NO: 30261 - protein, 97 aa, Homo sapiens
VGSGFTFSDYYMTWVRQAPGKGLEWISYISTSGSLIYYADSVKGRFTISRDNAQNSVHLQMSGVRAEDTAVYYCARGLGSDYSRDYWGQGTMVTVSS

SEQ ID NO: 30262 - protein, 97 aa, Homo sapiens
AASGFTFSDYYMCWVRQAPGKGLEWVSYISTSGSVTHYADSVRGRFSISRDNTKNSLYLLMNSLRAEDTAIYYCARGLGSDYSRDYWGQGTLVTVSS

SEQ ID NO: 30263 - protein, 101 aa, Homo sapiens
ASDYTFTNYGISWVRQAPGQGLEWMGWISAYNGNTNYAQKVQGRVTMTTDTSTSTAYMELRSLRSDDTAMYYCARAEVSASYHYYYYMDVWGKGTTVTVSS

SEQ ID NO: 30264 - protein, 101 aa, Homo sapiens; identical to SEQ ID NO: 30263

SEQ ID NO: 30265 - protein, 101 aa, Homo sapiens
AASGFTFIDYYMSWIRQAPGRGLEWVSYISSSGNTMYYADSVQGRFTISRDNAKNSLYLQMNSLRAEDTAVYFCARVGDGYNKYYYYMDVWGKGTTVTVSS

SEQ ID NO: 30266 - protein, 101 aa, Homo sapiens
AASGFTFIDYYMSWIRQAPGRGLEWVSYITSSGNTMYYADSVQGRFTISRDNAKNSLYLQMNSLRAEDTAVYFCARVGDGYNKYYYYMDVWGKGTMVTVSS

SEQ ID NO: 30267 - protein, 99 aa, Homo sapiens
AASGFTFSTYAMSWVRQAPGKGLEWVSTISGDGGATYYPDSVKGRFTISRDNSMHTLYLQMNSLRAEDMAVYYCAIRPAPIFVYYMGVWGKGTTVSVSS

SEQ ID NO: 30268 - protein, 99 aa, Homo sapiens
AASGFTFSTYAMSWVRQAPGKGLEWVSTISGDGGATYYPDSVKGRFTISRDNSMHTLYLQMNSLRAEDTAVYYCAIRPAPIFVYYMGVWGKGTTVSVSS

SEQ ID NO: 30269 - protein, 98 aa, Homo sapiens
TVSGGSISGSGYYWSWIRQHPGKGLEWIGYISYTVSTDYNPSLKSRVTTSVDTSKNQFSLKLNSVTAADTAVYYCARGGSGSAYFDYWGQGALVTVSS

SEQ ID NO: 30270 - protein, 98 aa, Homo sapiens
TVSGGSISGSGYYWSWIRQHPGKGLEWIGYISYTVSTDYNPSLKSRVTTSVDTSKNQFSLRLSSVTAADTAVYYCARGGSGSAYFDYWGQGTLVTVSS

SEQ ID NO: 30271 - protein, 97 aa, Homo sapiens
AASGFTFGTYWMSWVRQAPGKGLEWVANIKQDGSEHYYVASVRGRFTLSRDNAHNSLYLQMNSLRAEDTAVYYCVRDCGTSNCWAYWGQGTLVTVSS

SEQ ID NO: 30272 - protein, 97 aa, Homo sapiens
AASGFTFSTYWMSWVRQAPGKGLEWVANIKQDGSEHYYVASVRGRFTLSRDNAHNSLYLQMNSLRAEDTAVYYCVRDCGTSNCWAYWGQGILVTVSS

SEQ ID NO: 30273 - protein, 97 aa, Homo sapiens; identical to SEQ ID NO: 30272

SEQ ID NO: 30274 - protein, 95 aa, Homo sapiens
AASGFDVTTNYMSWVRQAPGRGLEWVSITHIAGSTYYGGSVKGRFTVSRDNSKNIVFLQMNSLRVEDTAVYYCATRRKVFYMDVWGKGTPVTVSS

SEQ ID NO: 30275 - protein, 95 aa, Homo sapiens; identical to SEQ ID NO: 30274

SEQ ID NO: 30276 - protein, 93 aa, Homo sapiens
AASGFTFSSAAMSWVRQAPGKGLEWVSTISDTGFDTYYADSVEGRFTISRDNSKNALYLQMNSLRAEDTALYYCAHRTAFDFWGLGTMVTVSS

SEQ ID NO: 30277 - protein, 93 aa, Homo sapiens
AASGFTFSSAAMSWVRQAPGKGLEWVSTITDTGFDTWYADSVEGRFTISRDNSKNALYLQMNSLRVEDTALYYCAHRTAFDFWGLGTMVTVSS

SEQ ID NO: 30278 - protein, 93 aa, Homo sapiens; identical to SEQ ID NO: 30277

SEQ ID NO: 30279 - protein, 93 aa, Homo sapiens
AASGFTFSSAAMSWVRQAPGKGLEWVSTITDTGFDTWYADSVERRFTISRDNSKNALYLQMNSLRVEDTALYYCAHRTAFDFWGLGTMVTVSS

SEQ ID NO: 30280 - protein, 98 aa, Homo sapiens
AASGFTFTTYAMAWVRQAPGKGLEWVSTISDSGDRTYYADSVKGRFTISRDNSKSTLHLHMNSLRAEDTAVYYCARGPTLVLGYMDVWGKGTTVTVSS

SEQ ID NO: 30281 - protein, 98 aa, Homo sapiens
AASGFTFSTYAMAWVRQAPGKGLEWVSTISDSGDRTYYADSVKGRFTISRDNSKSTLHLYMNSLRAEDTAVYYCARGPTLVLGYMDVWGKGTTVTVSS

SEQ ID NO: 30282 - protein, 98 aa, Homo sapiens
AASGFTFSTYAMAWVRQAPGKGLEWVSTLSDSGERTYYADSVKGRFTISRDNSKSTLHLHMNSLRAEDTAIYYCARGPTLVLGYMDVWGKGTTVTVSS

SEQ ID NO: 30283 - protein, 98 aa, Homo sapiens
AASGFTFSTYAMAWVRQAPGKGLEWVSTISDSGDRTYYADSVKGRFTISRDNSKSTLHLHMNSLRAEDTAIYYCARGPTLVLGYMDVWGKGTTVTVSS

SEQ ID NO: 30284 - protein, 101 aa, Homo sapiens
ASGFTVSSNYMTWVRQAPGKGLEWVSLISSSGSTYYADSVKGRFTISRDNSKNTLYLQMNSLRAEDTAVYYCARVIRESSGWNHYSYMDVWGKGTTVSVSS

SEQ ID NO: 30285 - protein, 101 aa, Homo sapiens
ASGFTVSTNYMTWVRQAPGKGLEWVSLISSSGTTYYTDSVKGRFTISRDNSKNTLYLQMNSLRAEDTAVYFCARVIRESSGWNHYSYMDVWGKGTSLSVSS

SEQ ID NO: 30286 - protein, 101 aa, Homo sapiens
ASGFTVSSNYMTWVRQAPGKGLEWVSLISSSGSTYYADSVKGRFTISRDNSKNTLYLQVNSLRAEDTAVYYCARVIRESSGWNHYSYMDVWGKGTTVSVSS

SEQ ID NO: 30287 - protein, 101 aa, Homo sapiens
ASGFTVSTNYMTWVRQAPGKGLEWVSLISSSGTTYYADSVKGRFTISRDNSKNTLYLQMNSLRAEDTALYYCARVIRESSGWNHYSYMDVWGKGTTVSVSS

SEQ ID NO: 30288 - protein, 93 aa, Homo sapiens
AASGFTFSNYLMNWVRQAPGKGLEWVSYISDSSSAMSYSDSVKGRFTISRDNAKNSLYLQMNSLRDEDTAVYYCVRDHYFDYWGQGTLVTVSS

SEQ ID NO: 30289 - protein, 93 aa, Homo sapiens
AASGFTFSSYLMNWVRQAPGKGLEWVSYISDSSSAMSYADSVKGRFTISRDNAKNSLYLQMNSLRDEDTAVYYCVRDHYFDYWGQGTLVTVSS

SEQ ID NO: 30290 - protein, 97 aa, Homo sapiens
AASGFTFMTYEFNWVRQAPGRGLEWIAYISSLGSTIHYSDSAKGRFTISRDNAKDSLYLQMTSLRPDDTAIYYCARGRAIITGIDFWGQGTLVTVSS

SEQ ID NO: 30291 - protein, 97 aa, Homo sapiens; identical to SEQ ID NO: 30290

SEQ ID NO: 30292 - protein, 97 aa, Homo sapiens
AASGFTFMTYEFNWVHQAPGRGLEWIAYISSLGSTIHYSDSAKGRFTISRDNAKDSLYLQMTSLRPDDTAIYYCARGRAIITGIDFWGQGTLVTVSS

SEQ ID NO: 30293 - protein, 97 aa, Homo sapiens; identical to SEQ ID NO: 30290

SEQ ID NO: 30294 - protein, 97 aa, Homo sapiens
AASGFTFMTYEFNWVRQAPGRGLEWIAYISSPGSTIHYSDSAKGRFTISRDNAKDSLYLQMTSLRPDDTAIYYCARGRAIITGIDFWGQGTLVTVSS

SEQ ID NO: 30295 - protein, 97 aa, Homo sapiens
AASGLTFMTYEFNWVRQAPGRGLEWIAYISSLGSTIHYSDSAKGRFTISRDNAKDSLYLQMTSLKPDDTAIYYCARGRAIITGIDFWGQGTLVTVSS

SEQ ID NO: 30296 - protein, 97 aa, Homo sapiens; identical to SEQ ID NO: 30290

SEQ ID NO: 30297 - protein, 99 aa, Homo sapiens
ASGDSFKNYGINWVRQAPGQGLEWMGGIIPLFNTADYAQKFLGRITITADEFRSTAYMEVTSLKSEDTAVYYCARAAVVAARRNWFDSWGQGTLVTVSS

SEQ ID NO: 30298 - protein, 99 aa, Homo sapiens
ASGDSFKNYGINWVRQAPGQGLEWMGGIIPLFNTADYAQKFLGRITITADEFRSTAYMEVTSLKFEDTAVYYCARAAVVAARRNWFDSWGQGTLVTVSS

SEQ ID NO: 30299 - protein, 102 aa, Homo sapiens
AASGLIVSSTYMSWVRQAPGKGLEWVSVIYRDSTTYYADSVKGRFTISRDNSKNTLFLQMDSLTAEDTAIYYCVRGGGAYCGGDCLRTLDLWGQGTMVTVSS

SEQ ID NO: 30300 - protein, 102 aa, Homo sapiens
AASGFTVSRTYMSWVRQAPGKGLEWISVIYRYGDTYYAESVKGRFIISRDSSKNTLFLQMGSLTAEDTAIYYCVRGGGAYCGGDCLRTLDLWGQGTMVTVSS

SEQ ID NO: 30301 - protein, 100 aa, Homo sapiens
AASGFAFSSYDMHWVRQAPGKGLEWVAVISPDGNSKNYADSVKGRFTVSRDNSKNTLYLQMNILRTEDTALYYCAKKTVVGIGRGGLDYGGQGSLVTVSS

SEQ ID NO: 30302 - protein, 100 aa, Homo sapiens
AASGFAFSSYDMHWVRQAPGKGLEWVAVISPDGNSKNYADSVKGRFTVSRDNSKNTLYLQMNSLRTEDTALYYCAKKTVVGIGRGGLDYGGQGSLVTVSS

SEQ ID NO: 30303 - protein, 100 aa, Homo sapiens; identical to SEQ ID NO: 30302

SEQ ID NO: 30304 - protein, 102 aa, Homo sapiens
EVSGFTFSKYAMSWVRQTPGKGLQWVSGMTGSGNDTYYADSVKGRFTISGDTSKNTVYLLMDRLRVDDTAVYYCASGGVPDGNYYYYYMDGWGKGTMVTVSS

SEQ ID NO: 30305 - protein, 102 aa, Homo sapiens
EVSGFTFSRYAMSWVRQTPGKGLQWVSGMTGSGNDTYYADSVKGRFTISGDTSKNTVYLLMDRLRVEDTAVYYCASGGVPDGNYYYYYMDGWGKGTMVTVSS

SEQ ID NO: 30306 - protein, 97 aa, Homo sapiens
TVSGGSVSSNSFYWNWIRQPPGKGLEWIGYIYYTGSTNYNPSLKSRVTISVDTSKNQFSLKLSSVTAADTAVYYCASGGQITTIEYWGQGTLVTVSS

SEQ ID NO: 30307 - protein, 97 aa, Homo sapiens
TVSGGSVSSNSFYWNWIRQPPGKGLEWIGYIYYTGSTNYNPSLKSRVTISVDTSKNLFSLKLSSVTAADTAVYYCASGGQITTIEYWGQGTLVTVSS

SEQ ID NO: 30308 - protein, 111 aa, Homo sapiens
TQTLTLTCAFSGFSLNTSGMCVSWLRQPPGKALEWLALVDWDDDKYYSTSLKTRLTISKDTSKNQVVLTLTNMDPVDTATYYCARKYDNRMDGLGGAFDIWGQGTTVTVSS

SEQ ID NO: 30309 - protein, 111 aa, Homo sapiens
TQTLTLTCTFSGFSLNTSGMCVSWIRQPPGKALEWLAVIDWDDDKYYSTSLKTRLTISKDTSKNQVVLIMTNMDPVDTGTYYCARKYDNRMDGLGGAFDIWGQGTMVTVSS

SEQ ID NO: 30310 - protein, 111 aa, Homo sapiens
TQTLTLTCTFSGFSLNTSGMCVSWIRQPPGKALEWLALIDWDDDKYYITSLKTRLTISKDLSKKQVVLTMTNMDPADTATYYCARKYDNRMDGLGGAFDIWGQGTLVTVSS

SEQ ID NO: 30311 - protein, 102 aa, Homo sapiens
ASGFTFSDHAMNWVRQAPGKGLEWVSIMSGVSETTYYADPVKGRFTIFRDNSKNTLYLQMNSLRVEDTAVYFCAKSQGSNSWSFYYDYMDVWGKGTTVTVSS

SEQ ID NO: 30312 - protein, 103 aa, Homo sapiens
AASGFTFSDYAMNWVRQAPGKGLEWVSIMSGVSETTYYADPVKGRFTIFRDNSKNTLYLQMNSLRVEDTAVYFCAKSQGSNSWSFYYDYMDVWGKGTTVTVSS

SEQ ID NO: 30313 - protein, 103 aa, Homo sapiens
AASGFTFSTYSMNWVRQAPGKGLEWVSYISSSSSTIYYADSVKGRFTISRDNAKKSLYLQMNSLRDEDTAVYYCARGGNDFWSGYTDEDFDPWGQGTLVTVSS

SEQ ID NO: 30314 - protein, 103 aa, Homo sapiens
AASGFTFSSYSMNWVRQAPGKGLEWISYISSSSSTIYYADSVKGRFTISRDNAKKSLYLQMNSLRDEDTAVYYCARGGNDFWSGYTDEDFDPWGQGTLVTVSS

SEQ ID NO: 30315 - protein, 97 aa, Homo sapiens
TVSGGSIGNYYWSWIRQPPGKGLEWIGYIYYTGSTNYNPSLKSRVTISVDTSKNQFSLSLSSVTAADTAVYYCAKGRSGFYTAFDPWGQGTLVTVSS

SEQ ID NO: 30316 - protein, 97 aa, Homo sapiens
TVSGGSIGNYYWSWIRQPPGKGLEWIGYIYYTGSTNYNPSLKSRVTISVDTSKNQFSLSLRSVTAADTAVYYCAKGRSGFYTAFDPWGQGTLVTVSS

SEQ ID NO: 30317 - protein, 96 aa, Homo sapiens
SASGFTFSDYAMHWVRQAPGKGLEHVSSVSSDGHTTYYADSVKGRFTISRDNSKNSLYLQMSSLRAGDTAVYYCVRALQWDYFDDWGQGTLVTVSS

SEQ ID NO: 30318 - protein, 96 aa, Homo sapiens
SASGFTFSDYAMHWVRQAPGKGLEHVSSVSSDGHTTYYADSVKGRFTISRDNSKNSLYLQMSSLRAGDTAVFYCVRALQWDYFDDWGQGTLVTVSS

SEQ ID NO: 30319 - protein, 106 aa, Homo sapiens
AASGLTFSSHTMHWVRQAPGKGLEWVAAIWSDGINKYYADSVKGRFSISRDNSKSALYLELNNLRGEDTAVYYCARAPGEGTYYDILTGLSYMDVWGKGTTVTVSS

SEQ ID NO: 30320 - protein, 106 aa, Homo sapiens
AASGFTFSSHTMHWVRQAPGKGLEWVAAIWSDAINKYYADSVKGRFTISRDNSNNTLYLQMDSLGAEDTAVYYCARAPGEGTYYDILTGLSYMDVWGKGTTVTVSS

SEQ ID NO: 30321 - protein, 100 aa, Homo sapiens
AASGFTVSSNYMSWVRQAPGKGLEWVSIIYSGGHTYYADSVKGRFTISRDNSKNTLYLQMNSLRAEDTAVYYCARDGGNGVSYYYYMDVWGKGTTVTVSS

SEQ ID NO: 30322 - protein, 100 aa, Homo sapiens
AASGFTVSSNYMSWVRQAPGRGLEWVSIIYSGGSTYYADSVKGRFTISRDNSKNTVYLQMNSLRAEDTAVYYCARDGGNGVSYYYYMDVWGKGTTVTVSS

SEQ ID NO: 30323 - protein, 102 aa, Homo sapiens
AASGLTFSSYWMSWVRQAPGKGLEWVANIKQDGSEKYYVDSVKGRFTISRDNSKNSLYLQMNSLRAEDTAVYFCARESLCSSRRCPPRFDLWGQGTLVTVSS

SEQ ID NO: 30324 - protein, 102 aa, Homo sapiens; identical to SEQ ID NO: 30323

SEQ ID NO: 30325 - protein, 102 aa, Homo sapiens
AASGFTVSSNYMSWVRQAPGKGLEWVSVIHRGGSTYYGDSVKGRFTISRDNSKNTLYLQMNSLTAEDTAVYYCARDLRRGVGRNYYYYMDVWGKGTTVTVSS

SEQ ID NO: 30326 - protein, 102 aa, Homo sapiens
AASGFTVSSNYMSWVRQAPGKGLEWVSVIHRGGSTYYADSVKGRFTISRDNSKNTLYLQMNSLRVEDTAVYYCARDLRRGVGRNYYYYMDVWGKGTTVTVSS

SEQ ID NO: 30327 - protein, 94 aa, Homo sapiens
AASGFTFSDYYMSWIRQAPGKGLECVAYISSSGTPMYYADSVKGRFTISRDNAKNSLYLQMNSLRAEDTAVYYCAKNRFDLLLWGQGTLLTVSS

SEQ ID NO: 30328 - protein, 94 aa, Homo sapiens
AASGFTFSDYYMTWIRQAPGKGLECVSYISSTGTPMYYADSVQGRFTISRDNAKNSLYLHMNSLRAEDTAVYYCAKNRFDLLLWGQGTLVTVSS

SEQ ID NO: 30329 - protein, 93 aa, Homo sapiens
ASGYSFTTYGIHWVRQAPGQALEWLGWINVGGGITKYSENFQGRVTMTRETSATTAYMELTDLRHEDMAVYYCVRGGGTVEFWGQGTLVTVSS

SEQ ID NO: 30330 - protein, 93 aa, Homo sapiens
ASGYTFTAYGMHWLRQAPGQRPEWMAWISTATGNTMYSENFQGRVTITRETSASTAYMELTSLTSEDTAVYFCVRGGGTVEFWGQGTLVSVSS

SEQ ID NO: 30331 - protein, 101 aa, Homo sapiens
AASGFTFSSYAMSWVRQAPGKGLEWVSAISGSGGSTYYADSVKGRFTISRDNSKNTLYLQMNSLRAEDTAVYYCAKVRGYSGYDLYYMDVWGKGTTVTVSS

SEQ ID NO: 30332 - protein, 101 aa, Homo sapiens
AASGFTFTTYAMSWVRQAPGKGLEWVSDISGSGGSTYYADSVKGRFTISRDNSKNTLYLQMNSLRADDTAVYYCAKVRGYSGYDLYYMDVWGKGTTVTVSS

SEQ ID NO: 30333 - protein, 102 aa, Homo sapiens
ASGSTFTNYAISWVRQAPGQGLEWMGGIIPMYDTTTYAQKFKGRVTITADESTSTAYMELSSLTSDDTAVYYCVRARTMYDSVSYWNYMDVWGKGTAVTVSS

SEQ ID NO: 30334 - protein, 102 aa, Homo sapiens
ASGSSFNNYAISWVRQAPGQGLEWMGGIIPMFDTTTYAQKFKGRVTITADESTMTAYMELNSLTSDDTGVYYCVRARTMYDSVSYWNYMDVWGKGTAVTVSS

SEQ ID NO: 30335 - protein, 102 aa, Homo sapiens
ASGNTFNNYAISWVRQAPGQGLEWMGGIIPMFGTTSYAQRFKGRVTITADESTMTAFMELSSLTSDDTAVYYCVRARTMYDSVSYWNYMDVWGNGTAVTVSS

SEQ ID NO: 30336 - protein, 102 aa, Homo sapiens
AASGFTFTNAWMSWVRQAPGKGLEWVGRIKTKGEGGPTDYAAPVKDRFIISRDDSEDTLYLQLNNLKTEDTALYYCTTDRYGGTSGAQFDYWGQGTLVTVSS

SEQ ID NO: 30337 - protein, 102 aa, Homo sapiens
AASGFTFINAWMSWVRQAPGKGLEWVGRIKSKSDGGATHYAASVKDRVTISRDDSADTLYLQLNNLKTEDTALYYCTTDRYGGTSGAQFDYWGQGTLVTVSS

SEQ ID NO: 30338 - protein, 102 aa, Homo sapiens
AASGFTFINAWMSWVRQAPGKGLEWVGRIKSKGDGGAIDYAAPVKDRFRISRDDSEDTLYLHLNYLKTEDTALYYCTTDRYGGTSGAQFDYWGQGTLVTVSS

SEQ ID NO: 30339 - protein, 99 aa, Homo sapiens
TVSGGSIRSRNYKWGWIRQPPGKGLEWIGTVFYGGDTDYDPSLKSRVTISLDTSKNQFSLTVNSVTAADAAVYYCARQSSSVVALFDYWGQGTLVTVSS

SEQ ID NO: 30340 - protein, 99 aa, Homo sapiens
TVSGGSIRSRNYKWGWIRQPPGKGLEWIGTVFYGGNTDYDPSLKSRVTISLDTSKNQFSLTVNSVTAADAAVYYCARQSSSVVALFDYWGQGTLVTVSS

SEQ ID NO: 30341 - protein, 102 aa, Homo sapiens
VAGFSLEDFGLSWVRQLPGKGLEWVSGLKLTDGGARYADSVKGRFTISRDPSKNIAYLHMTSLTDDDTALYRCAREKREPAGGLYYYYSMDVWGKGTTVTVS

SEQ ID NO: 30342 - protein, 102 aa, Homo sapiens
VAGFSLEDFGLSWVRQLPGKGLEWVSGLKLTDGGARYADSVKGRFTVSRDPSKNIVYLHMTSLTDDDTALYRCAREKREPAGGLYYYYSMDVWGKGTTVVVS

SEQ ID NO: 30343 - protein, 99 aa, Homo sapiens
AASGFSFSSYIIHWVRQAPGKGLEWVAVFSRDERFEFYGDSVKGRFTISRDNSKNTLYLQMNSLRDEDTAVYFCAREDKNNFDNAFDVWGQGTMVTVSS

SEQ ID NO: 30344 - protein, 99 aa, Homo sapiens; identical to SEQ ID NO: 30343

SEQ ID NO: 30345 - protein, 99 aa, Homo sapiens
AASGFTFNNAWMSWVRQAPGKGLEWVGRIKSKADGGTADYVVPVEGRFTISRDDSKNTLYLQMNSLKTDDTAVYYCTTDPYHGYSFYYWGQGTLVTVSS

SEQ ID NO: 30346 - protein, 99 aa, Homo sapiens
AASGFTFNNAWMSWVRQAPGKGLEWVGRIKSNTDGGTADYVVPVKGRFTISRDDSKNTLYLQMNSLKTEDTAVYYCTTDPYHGYSFYYWGQGTLVTVSS

SEQ ID NO: 30347 - protein, 98 aa, Homo sapiens
TVSGDSVSSSSYYWGWIRQAPGKGLEWIGSIYYSGSTYYAPSLKSRVTIYVDMSKNHFSLRLSSVTAADTSVYYCARVVWYDGWFDSWGQGTLVTVSS

SEQ ID NO: 30348 - protein, 98 aa, Homo sapiens
TVSGGSVSSSSYYWGWIRQAPGKGLEWIGSIYYSGSTYYAPSLKSRVTIYVDMSKNHFSLRLSSVTAADTSVYYCARVVWYDGWFDSWGQGTLVTVSS

SEQ ID NO: 30349 - protein, 98 aa, Homo sapiens; identical to SEQ ID NO: 30347

SEQ ID NO: 30350 - protein, 98 aa, Homo sapiens; identical to SEQ ID NO: 30348

SEQ ID NO: 30351 - protein, 98 aa, Homo sapiens
TVSGGSISSSSYYWGWIRQAPGKGLEWIASIYYSGSTYYAPSLKSRVTIKVDMSKNHFSLRLSSVTAADTSVYYCARVVWYDGWFDSWGQGTLVTVSS

SEQ ID NO: 30352 - protein, 94 aa, Homo sapiens
GVHGGSVSSVHWWSWIRQSPEKGLEWIGEVHHNGSSNYNPSLKSRVTMSVDKSKNQFSLKLNSVTAADTAVYYCARDHGDSGHWGQGTLVTVSS

SEQ ID NO: 30353 - protein, 94 aa, Homo sapiens
AVSGGSIRSPYWWSWVRQTPGKGLEWIGRVHHNGSTTYNPSLRTRVTMSVDLAHNQFSLNMKSLTAADTAVYYCARDHGDSGHWGQGTLVTVSS

SEQ ID NO: 30354 - protein, 94 aa, Homo sapiens
AVSGVSINNDHWWSWIRQPPGMRLEWIGKIHHNGSTDYNPSLRSRVTISLDKSMNLLSLKLTSVSATDTAVYYCARDHGDSGHWGQGTLVTVSS

SEQ ID NO: 30355 - protein, 94 aa, Homo sapiens
DVSGVSISSDHWWSWIRQPPGKRLEWIGKIHHNGSTDYNPSLKSRVTISLDESKNQFSLKLTSVSATDTAVYYCARDHGDSGHWGQGSLVTVSS

SEQ ID NO: 30356 - protein, 99 aa, Homo sapiens
ASGYPFTTYWIGWVRQMPEKGLEWLGIINPRDSETRYSPSLQLQVTMSVDKSVSTAYLQWTRLKVSDSAMYYCARLLFPVPAAMAYFDTWGQGTLVTVS

SEQ ID NO: 30357 - protein, 99 aa, Homo sapiens; identical to SEQ ID NO: 30356

SEQ ID NO: 30358 - protein, 106 aa, Homo sapiens
AASGFTFSSFAMTWVRQAPGKGLEWVSGISGSGGSTYYAESVKGRFTISRDNSKNTLYLQMNSLRAEDTAVYYCAKSYCSGDSCSSVSYYYYMDVWGKGTTVTVSS

SEQ ID NO: 30359 - protein, 106 aa, Homo sapiens
AASGFTFSSFAMTWVRQAPGKGLEWVSGISGSGGNTYYAESVKGRFTISRDNSKNTLFLQMNSLRAEDTAVYYCAKSYCSGDSCSSVSYYYYMDVWGKGTTVTVSS

SEQ ID NO: 30360 - protein, 98 aa, Homo sapiens
SGYTFTSYGITWVRQAPGQGLEWMGWISANNGNTNYAPKVQGRVTMTTDTSTSTVYMDLRSLTSDDTAVYYCARTKLHCGGDCSPGNWGQGTLVTVSS

SEQ ID NO: 30361 - protein, 98 aa, Homo sapiens
SGYTFTSYGITWVRQAPGQGLEWMGWISGNNGNTNYAQKVQGRVTMTTDTSTSTAYMDLRSLTSDDTAVYYCARTKLHCGGDCSPGNWGQGTLVTVSS

SEQ ID NO: 30362 - protein, 96 aa, Homo sapiens
AVSGFTFSDYWISWVRQAPGKGLEWVANINPGGSEKYYVDSVKGRFTISRDNAKNSLYLQMNSLRVEDTAVYYCVCDKNFSPSGVWGQGALVTVSS

SEQ ID NO: 30363 - protein, 96 aa, Homo sapiens
AVSGFTFSDYWISWVRQAPGKGLEWVANINAGGSEKYYVDSVKGRFTISRDNAKNSLYLQMNSLRVEDTAVYYCVCDKNFSPSGVWGQGTLVTVSS

SEQ ID NO: 30364 - protein, 94 aa, Homo sapiens
AASGFTFSSYTMNWVRQSPGKGLEWVSSISRSSDQIYYLDSVKGRFTVSRDNAKNSVYLQMNSLRAEDTAFYYCARTFAALDYWGQGALVTVSS

SEQ ID NO: 30365 - protein, 94 aa, Homo sapiens; identical to SEQ ID NO: 30364

SEQ ID NO: 30366 - protein, 96 aa, Homo sapiens
AVSGFTISDAWLNWVRQAPGKGLEWIGRIRSKTDGGTIDYAAPVKGRFTFSRDDSENTLYLQMNSLKTEDTAIYYCTKDWGYLTRWGQGTLITVSS

SEQ ID NO: 30367 - protein, 96 aa, Homo sapiens
AVSGFTISDAWLNWVRQAPGKGLEWIGRIRSKTDGGTIDYAAPVKGRFTFSRDDSENTLYLQMNSLKTEDTAIYYCTKDWGYLTRWGQGTLVTVSS

SEQ ID NO: 30368 - protein, 97 aa, Homo sapiens
AASGFSITNYGIGWVRQAPGKGLEWVSTISGSGDDTYYADSVRGRFTISRDSSKNTLYLQMHSLRVEDTALYYCATTFGSWSRFDYWGQGTLVTVSS

SEQ ID NO: 30369 - protein, 97 aa, Homo sapiens
AASGFSITNYGIGWVRQAPGKGLEWVSTINAAGDDTYYADSVRGRFTISRDVSKNTLYLQMHSLTVEDTALYYCATTFGSWSRFDYWGQGTLVTVSS

SEQ ID NO: 30370 - protein, 97 aa, Homo sapiens
AASGFTVSSNSMSWVRQAPGKGLEWVSVIYVGGSTYYADSVKGRFTISRDNSKNTLFLQMNILRAEDTAVYYCARALATSGYYFDYWGQGTLVTVSS

SEQ ID NO: 30371 - protein, 97 aa, Homo sapiens
AASGFTVSSNSMSWVRQAPGKGLEWVSVIYVGGSTYYADSVKGRFTISRDNSKNTLYVQMNSLRAEDTAVYYCARALATSGYYFDYWGQGTLVTVSS

SEQ ID NO: 30372 - protein, 101 aa, Homo sapiens
AASGFTFSTFWMQWVRQVPGKGLVWVAHINSDGSRTTYADSVKGRFTISRDNAKNTLYLQMNTLRAEDTAVYYCARYCSSSSCYDATFDIWGQGTMVTVSS

SEQ ID NO: 30373 - protein, 101 aa, Homo sapiens
AASGFSFSTYWMQWARQAPGKGLVWVSHINSDASRKTYADSVKGRFAISRDNAKNTLYLQMDNLRAEDTAVYYCARYCSSSSCYDATFDIWGLGTMVTVSS

SEQ ID NO: 30374 - protein, 101 aa, Homo sapiens
AASGFSFSSYWMHWVRQAPGKGLVWVSHINSDASRTTYADSVKGRFTISRDNAKNTLYLQMNNLRAEDTAVYYCARYCSSSSCYDATFDIWGQGTMVTVSS

SEQ ID NO: 30375 - protein, 101 aa, Homo sapiens
AASGFTFSSYWMHWVRQAPGKGLVWVSHINSDASRTTYADSVKGRFTISRDNAKNTLYLQMNILRAEDTAVYYCARYCSSSSCYDATFDIWGQGTMVTVSS

SEQ ID NO: 30376 - protein, 96 aa, Homo sapiens
AASGFTLSQYYMNWIRQAPGKGLEWIAYINDSGETIYYADSVKGRFTISRDNAKNSLYLQMNSLRAEDTAVYYCARDQFPLPFDPWGQGTLVTVSS

SEQ ID NO: 30377 - protein, 96 aa, Homo sapiens
AASGFSLSQYYMIWVRQAPGKGLEWVAYISNSGDITYYADSVKGRFTISRDTAKNSLYLQMNSLTAEDTAVYYCARDQFPLPFDPWGQGTLVTVSS

SEQ ID NO: 30378 - protein, 108 aa, Homo sapiens
TTSGFTFADFDVSWVRQAPGKGLEWVGFIRSKTYHETIEDAASVKDRPPTEYASSVKGRFTISRDDSKGIAYLQMNSLKPEDTGVYYCSPGEALFDYWGQGTLVTVSS

SEQ ID NO: 30379 - protein, 108 aa, Homo sapiens
TTSGFTFGDFDVSWVRQAPGKGLEWVGFIRSKTYNETIEDAASVKDRPPTEYASSVKGRFTIFRDDFKGIAYLQMNSLRPEDTAVYYCSPGEALFDYWGQGTLVTVSS

SEQ ID NO: 30380 - protein, 99 aa, Homo sapiens
ASGYTLTNYAMHWVRQAPGQRLEWVGWINAGNGDPKYSQKFQGRVTLASDTSASTAYMELSSLRSEDTALYYCARVRFDSSGYYLLDYWGQGTLVTVSS

SEQ ID NO: 30381 - protein, 99 aa, Homo sapiens
ASGYTLTNYAMHWVRQAPGQRLEWVGWINAGNGDPKYSQKFQGRVTLTSDTSASTAYMELSSLRSEDTALYYCARVRFDSSGYYLLDYWGQGTLVTVSS

SEQ ID NO: 30382 - protein, 100 aa, Homo sapiens
EGFGFTFSTYWISWVRQAPGKGPEWVGTIKQDGSEIYYVDSLKGRFTISRDNAKNSVYLQMNSLRAEDTAVYFCAREGWGLRGNYYMDVWGKGTTVTVSS

SEQ ID NO: 30383 - protein, 100 aa, Homo sapiens
EGFGFTFSTYWISWVRQAPGKGLEWVGTIKQDGSEKYYVDSLQGRFTISRDNSKNSVYLQMNSLRAEDTAVYYCAREGWGLRGNYYMDVWGKGTTVTVSS

SEQ ID NO: 30384 - protein, 97 aa, Homo sapiens
AVSGGSVTSRNWWSWVRQAPGKGLEWIGEIYHSGSTTYNPSLKSRVTMSVENSKNQFSLKLSAVTAADTAVYYCATDLYSSGRLDYWGQGTLVTVSS

SEQ ID NO: 30385 - protein, 97 aa, Homo sapiens
AVSGASISSRNWWSWVRQAPGKGLEWIGEIYHSGTSTDNPSLRSRLTMSVDMSKNQFSLKLSAVTAADTAIYYCATDLYSSGRLDYWGQGTLVTVSS

SEQ ID NO: 30386 - protein, 96 aa, Homo sapiens
SVSGGSISSYYWSWIRQPPGKGLEWIGYISYSGTTNYHPSLKSRVTISVDTSKNQFSLRLSSVIAADTAVYYCARVGGRAAPPLYWGPGILVTVSS

SEQ ID NO: 30387 - protein, 96 aa, Homo sapiens
SVSGGSISSYYWSWIRQSPGKGLEWIGYISYSGTTNYHPSLKSRVTISVDTSKNQFSLRLTSVIAADTAVYYCARVGGRAAPPLYWGPGILVTVSS

SEQ ID NO: 30388 - protein, 96 aa, Homo sapiens
EASGFSFSSSWMSWVRQAPGKGLEWVAYINQDGSQSNHVDSVKGRFTISRDNANNLLYLQMKSLRADDSAFYYCAKDAGRSGGVSGGRGTLVTVSS

SEQ ID NO: 30389 - protein, 96 aa, Homo sapiens
EASGFSFSNSWMSWVRQAPGKGLEWVAYINQDGSESNHVDSVKGRFTISRDNANNLVYLQMNSLRAEDSAVYYCAKDAGRSGGVSGGRGTLVTVSS

SEQ ID NO: 30390 - protein, 96 aa, Homo sapiens
AASGFTFSSYWMCWVRQAPGKGLEWVANINPDGGVKNYVDSVKGRFTISRDNAKNSLYLQMNSLRAEDTAVYYCASRSSRVSATTWGQGTLVTVSS

SEQ ID NO: 30391 - protein, 96 aa, Homo sapiens
AASGFTFSSYWMCWVRQAPGKGLEWVANINQDGGGKNYVDSVKGRFTISRDNAKNSLYLQMNSLRAEDTAVYYCASRSSRVSATTWGQGTLVTVSS

SEQ ID NO: 30392 - protein, 96 aa, Homo sapiens; identical to SEQ ID NO: 30391

SEQ ID NO: 30393 - protein, 100 aa, Homo sapiens
AASGFTFSDYYMSWIRQTPGKGLEWVSYLSGSSLNTNYADSVKGRFTISRDNAKNSLYLQMDSLRAEDTAVYYCARPPFPSDYYYYMDVWGKGTMVTVSS

SEQ ID NO: 30394 - protein, 100 aa, Homo sapiens
AASGFTFSDYYMSWIRQAPGKGLEWVSYLSGSSLNTNYADSVKGRFTISRDNAKNSLYLQMDSLRAEDTAVYYCARPPFPSDYYYYMDVWGKGTMVTVSS

SEQ ID NO: 30395 - protein, 95 aa, Homo sapiens
SGYTFTAYRISWVRQAPRQGLEWMGWSIVYNGDTNYAQNVQGRVTMTTDISTSTAYMELRGLRSDDTAVYYCARNDGGNGAFDYWGQGTLVTVSS

SEQ ID NO: 30396 - protein, 95 aa, Homo sapiens
SGYTFTSYRISWVRQAPRQGLEWMGWIIVYNGNTDYAHNLQGRVTMTIDTSTSTAYMELRSLRSDDTAVYYCARNDGGNGAFDYWGQGTLVTVSS

SEQ ID NO: 30397 - protein, 99 aa, Homo sapiens
SVSGGAMSNYYWTWIRQPPGKGLEWIGYISYTVGTKYNASLKSRVTMSLDTSKNQISLKLSSVTAADTALYYCARVGDLSGYYYYMDVWGSGTMVTVSS

SEQ ID NO: 30398 - protein, 99 aa, Homo sapiens
SVSGGAMRNYHWTWIRQPPGKGLEWIGYVSYTVGTKYNDSLKSRVTMSLDTSKNQISLKLSSVTAADTALYYCARVGDLSGYYYYMDVWGSGTMVTVSS

SEQ ID NO: 30399 - protein, 97 aa, Homo sapiens
AGSGFIFSDFAMHWVRQAPGKGLEWLAVISSDGIIRSYGESALGRFSISRDNSKRRLYLQMTSLNREDTAVYICARSLTLTSHMDVWGKGTTVTVSS

SEQ ID NO: 30400 - protein, 99 aa, Homo sapiens
ASGFIFSDFAMHWVRQPPGGGLEWLAIISSDGITKFFGDSVKGRQGPLSISRDNSKGTLYLEMTFLTSEDTATYFCARSLTLTSHMDVWGKGTTVTVSS

SEQ ID NO: 30401 - protein, 99 aa, Homo sapiens
AASGFTSESYAMHWVRQAPGKGLEYVAAINNNGYFTYYADSVKARFTISRDFSNNILFLQMDSLRPEDTAVYYCARGDGGGTIGTLPYWGLGTQVTVSS

SEQ ID NO: 30402 - protein, 99 aa, Homo sapiens
AASGFTFDSFAMHWVRQAPGKGLEYVAAINNNGYFTYYADSVKARFTIARDYATNTLFLHMDSLRPEDTAVYYCARGDGGGTIGTLPYWGLGTQVTVSS

SEQ ID NO: 30403 - protein, 99 aa, Homo sapiens
AASGFTFSSYAMHWVRQAPGKGLEYVSAIHSNGFSAYYANSVKARFTISRDYSKNTLYLQMDSLKPEDTAVYYCARGDGGGTIGTLPYWGLGTLVTVSS

SEQ ID NO: 30404 - protein, 99 aa, Homo sapiens; identical to SEQ ID NO: 30402

SEQ ID NO: 30405 - protein, 99 aa, Homo sapiens
AASGFTFSSYAMHWVRQAPGKGLEYVSAIHSNGFSAYYANSMKARFTISRDYSKNTLYLQMDSLKPEDTAVYYCARGDGGGTIGTLPYWGLGTLVTVSS

SEQ ID NO: 30406 - protein, 98 aa, Homo sapiens
VSGVSLSHNYWSWIRQSPEKGLEWIGFISYSGTTNYNPSFKSRATISSDTSKNQVSLTLTFVTAADTAVYYCATNGYNDGYSLSLDHWGQGTLVTVSS

SEQ ID NO: 30407 - protein, 98 aa, Homo sapiens
VSGASLSQNYWSWIRQSPEKGLEWIGFISYSGVTSYNPSFKSRATISSDTSKNQISLTLTFVTAADTAVYYCATNGYNDGYSLSLDHWGQGTLVTVSS

SEQ ID NO: 30408 - protein, 93 aa, Homo sapiens
VSGGSMSRNYAWSWVRQTPGKGLEWIGKIYPNGSTTYNPYLKSRLTMSIDKSQNQFSLKVKSVTAADTAVYYCTRDHGDSGYWGQGTLVTVSS

SEQ ID NO: 30409 - protein, 94 aa, Homo sapiens
AVSGGSISSPSCWSWVRQTPGKGLEWIGHIFHNGSTTYNPSLKSRLTMSIDKSQNQFSLKMTSVSAADTAVYYCTRDHGDSGYWGQGTLVTVSS

SEQ ID NO: 30410 - protein, 100 aa, Homo sapiens
AAPGLTLNNYAMSWVRQAPGKGLEWVSAISAGGSSTFYADSVKGRFTISRDNSKNTLYLQMNILIPDDTALYYCAKPLSPPLAHGGFDSWGQGTLVTVSS

SEQ ID NO: 30411 - protein, 100 aa, Homo sapiens
AAPGLSLNYYAMSWVRQAPGKGLEWVSAISGGGSSTFYADSVKGRFTISRDNSKNTLYLQMNILGPDDTALYYCAKPLSPPLAHGGFDSWGQGTLVTVSS

SEQ ID NO: 30412 - protein, 102 aa, Homo sapiens
AASGFTFSTYSMNWVRQAPGKGLEWVSYISSSSGTIYYADSVKGRFTISRDNAKNSLYLQMNSLRDEDTAVYYCARRDSPMVRGVTNWFDPWGQGTLVTVSS

SEQ ID NO: 30413 - protein, 102 aa, Homo sapiens
AASGFTFSNYSMNWVRQAPGKGLDWVSYISSSSSTIYYADSVKGRFTISRDNAKNSLYLQMNSLRDEDTAIYYCARRDSPMVRGVTNWFDPWGQGTLVTVSS

SEQ ID NO: 30414 - protein, 99 aa, Homo sapiens
AASGFTFSGSVMHWVRQAPGKGLEWVARIRSRTNGYATVYVASVEGRFTISRDDSKSTTYLEMTSLKGDDTAVYYCTRFESAGGFGDVWGQGTLVTVSS

SEQ ID NO: 30415 - protein, 99 aa, Homo sapiens
AASGFTFSGSVMHWVRQASGKGLEWVARIRSRANGYATVYVASVEGRFTISRDDSRNTTYLEMTSLKADDTAVYYCTRFESAGGFGDVWGQGTLVTVSS

SEQ ID NO: 30416 - protein, 99 aa, Homo sapiens
AAFGFTFSDYYMSWIRQAPGKGLEWVSYISDSSTYTNYADSVKGRFTISRDNAQNSLYLQMNSLRAEDTAVYYCARSGYSYGYGYFDYWGQGTLVTVSS

SEQ ID NO: 30417 - protein, 99 aa, Homo sapiens
AASGFTFSDYYMSWIRQAPGKGLEWVSYISTSSSYTNYADSVKGRFTISRDNAKNSLYLQMNSLRAEDTAVYYCARSGYSYGYGYFDYWGQGTLVTVSS

SEQ ID NO: 30418 - protein, 103 aa, Homo sapiens
TVSGDSISSTSYYWGWIRKTPGKGLEYIGSMYYSGNTYYNPSLKSRVTISVDTSKNQFSLQLSSVTAADTAAYYCARHRISSGGIRSNWFDPWGQGTLVTVSS

SEQ ID NO: 30419 - protein, 103 aa, Homo sapiens
TVSGDSISSTSYYWGWIRQTPGKGLEYIGSMYYSGNTYYNPSLKSRVTISVDTSKNQFSLQLSSVTAADTAAYYCARHRISSGGIRSNWFDPWGQGTLVTVSS

SEQ ID NO: 30420 - protein, 95 aa, Homo sapiens
AASGLPFIRYSMNWVRQAPGKGLEWVSSISSTSSSIYYADSVKGRFTISRDNAKNSLYLQMNSLRAEDTAVYYCASGYTYGHDYWGQGTLVTVSS

SEQ ID NO: 30421 - protein, 95 aa, Homo sapiens
AASGLPFRSYSMNWVRQAPGKGLEWVSSISSTSTSIYYADSVRGRFTISRDNAKNSLYLQMNSLRAEDTAVYYCASGYTYGHDYWGQGTLVTVSS

SEQ ID NO: 30422 - protein, 102 aa, Homo sapiens
AASGFTFSSYSMNWVRQAPGKGLEWVSSISTSSSFIYYADSVKGRFTVSRDNAKNSLYLQMNSLRVEDTAVYYCAGSRNDFWGGYNNWFDPWGQGTLVTVSS

SEQ ID NO: 30423 - protein, 102 aa, Homo sapiens
AASGFTFSSYSMNWVRQAPGKGLEWVSSISSSSSFIYYADSVKGRFTISRDNAKNSLYLQMNSLRVEDTAVYYCAGSRNDFWGGYNNWFDPWGQGTLVTVSS

SEQ ID NO: 30424 - protein, 96 aa, Homo sapiens
AASGFTFSLYEINWVRQAPGKGLEWVSYISSSGSSLSYADSVKGRFSISRDNAKNSVYLQMHSLRPEDTAVYYCARGDYWHYFDYWGRGSLVTVSS

SEQ ID NO: 30425 - protein, 95 aa, Homo sapiens
ASGFTFNSYEMNWVRQAPGKGLEWLSYISNSGTSLAYADSVKGRFTVARDNAKRSLYLEMYSLRAEDTAVYYCARGDYWHYFDYWGQGTPVTVSS

SEQ ID NO: 30426 - protein, 106 aa, Homo sapiens
TVSGGSINSGAYYWSWIRQHPGKGLEWIGYIYHSGSTYYNPSLKSRVTISVDTSNNQFSLKLSSVTAADTAVYYCARDTPNCSSTICYPRYYFDYWGQGTLVIVSS

SEQ ID NO: 30427 - protein, 106 aa, Homo sapiens
TVSGGPINSGAYYWSWIRQHPGKGLEWIGYIYHSGSTYYNPSLKSRVTISVDTSNNQFSLKLSSVTAADTAVYYCARDTPNCSSTICYPRYYFDYWGQGTLVIVSS

SEQ ID NO: 30428 - protein, 101 aa, Homo sapiens
AASGFTFSSSGMHWVRQAPGKGLEWVAVIWYDGSNKYYADPVKGRFTISRDNSKNTLYLQMNSLRVEDTAVYYCARVLGHYVSGRSHCDYWGQGTLVTVSS

SEQ ID NO: 30429 - protein, 101 aa, Homo sapiens
AASGFTFSSSGMHWVRQAPGKGLEWVAVIWYDGSNKYYADSVKGRFTISRDNSKNTLYLQMNSLRVEDTAVYYCARVLGHYVSGRSHCDYWGQGTLVTVSS

SEQ ID NO: 30430 - protein, 101 aa, Homo sapiens
AASGFTFSSSGMHWVRQAPGKGLEWVAVIWYDGSNKYYADSVKGRFTISRDNSKNMLYLQMNSLRAEDTAVYYCARVLGHYVSGRSHCDYWGQGTLVTVSS

SEQ ID NO: 30431 - protein, 102 aa, Homo sapiens
TVSGDSMARQHWSWVRQSPGKGLEFLAYIHYAGSPIYHPSLKSRVTISIDRAKNQFSLSLQSVTAADTAVYYCARVTDIVAGRVSRFYFDSWGQGTLVTVSS

SEQ ID NO: 30432 - protein, 102 aa, Homo sapiens
TVSGDSMARQHWSWVRQSPGKGLEFLAYIHYAGSPIYHPSLKSRLTISIDRAKNQFSLSLQSVTAADTAVYYCARVTDIVAGRVSRFYFDSWGQGTLVTVSS

SEQ ID NO: 30433 - protein, 95 aa, Homo sapiens
ISGDSVSSNSATWSWIRQYPSRGLEWLGRTYYRSGWYSDYAVFVKSRITITPDTSKNQFSLQLNSVTPEDTAVCYCARNNFMDVWGKGTTVTVSS

SEQ ID NO: 30434 - protein, 95 aa, Homo sapiens
ISGDSVSSNSATWSWIRQYPSRGLEWLGRTYYRSGWYSDYAVFVKSRITITPDTSKNQFSLQLNSVTPEDTAVYYCARNNFMDVWGKGTTVTVSS

SEQ ID NO: 30435 - protein, 93 aa, Homo sapiens
ISGDSVSSNSAAWNWFRQSPSRGLEWLGRTYYRSRWYYDYAASVRGRSSISPDTSKNQVSLQLNSVTPEDTAVYYCARWTNIWGQGTLVTVSS

SEQ ID NO: 30436 - protein, 93 aa, Homo sapiens
ISGDSVSSNSAAWNWFRQSPSRGLEWLGRTYYRSRWYSDYAVSVRGRSSISPDTSKNQVSLQLNSVTPEDTAVYYCARWTNIWGQGTLVTVSS

SEQ ID NO: 30437 - protein, 92 aa, Homo sapiens
AASGFTFTDYEMSWVRQAPGKGLEWVSFITGSGTTIYYADSVKGRFTISRDNAKKSVCLQMNSLRAEDTAVYYCVRGRSAVWGKGTTVTVSS

SEQ ID NO: 30438 - protein, 92 aa, Homo sapiens
AASGFTFTDYEMSWVRQAPGKGLEWVSFITGSGSTIYYADSVKGRFTISRDNAKKSVYLQMNSLRAEDTAVYYCVRGRSAVWGKGTTVTVSS

SEQ ID NO: 30439 - protein, 96 aa, Homo sapiens
TVSGDSIRSYYWSWMRQPPGKGLEWIGYIYNTESTTYNPSLESRVTISGDSSKNQFSLRLNSVTAADTAVYYCARVKDAVGGLDFWGQGNLVTVSS

SEQ ID NO: 30440 - protein, 96 aa, Homo sapiens
TVSGDSIRSYYWSWMRQPPGKGLEWIGYIYNTESTTYNPSLESRVTISGDSSKNQFSLRLNSVTAADTAVYYCARVKDAVGGLDFWGQGILVTVSS

SEQ ID NO: 30441 - protein, 94 aa, Homo sapiens
AASGINFNKAWMSWVRQAPGKGLEWIGRVKSETDGGTTDYAAPVEGRFTISRDDSINTVYLQMTGLKTEDTAVYYCTTGKLPLWGQGTLVTVSS

SEQ ID NO: 30442 - protein, 94 aa, Homo sapiens; identical to SEQ ID NO: 30441

SEQ ID NO: 30443 - protein, 94 aa, Homo sapiens; identical to SEQ ID NO: 30441

SEQ ID NO: 30444 - protein, 98 aa, Homo sapiens
TVSGGSIGGYFWSWFRQPPGKGLEWIGFVYYGGGPNRNPSLKSRVTMSVDRSNNQFSLNLNSVTAADTAVYYCAGTTVPLRPDGCDLWGPGTLVTVSS

SEQ ID NO: 30445 - protein, 96 aa, Homo sapiens
VSGGSIGGYFWSWFRQPPGKGLEWIGFVYYGGGPNLNPSLKSRVTMSVDRSNNQFSLKMNSVTAADTAVYYCAGTTVPLRPDGCDLWGPGTMVTVS

SEQ ID NO: 30446 - protein, 98 aa, Homo sapiens
VASGFTFSNYGMNWVRQAPGKGLEWVAALSTGGYIYYADSVRGRFTISRDNAHNSVYLQMNSLRAEDTAVYYCATGNLMTTIRPFDYWGQGTLVTVSS

SEQ ID NO: 30447 - protein, 97 aa, Homo sapiens
ASGFSFSNYGMNWVRQAPGKGLEWVSAMDFAGRVYYPDSLRGRFTISRDNANNAVFLQMNSLRAEDTAVYYCATGNLMTTIRPFDYWGQGTLVTVSS

SEQ ID NO: 30448 - protein, 101 aa, Homo sapiens
EASGFTFRNYWMHWVRQTPGKGLVWVSDVHGDGTATMYADSVEGRFTISRDNAKNTLFLQVNSLRVEDTALYYCVRGGTITPGGIFGVDYWGQGALVTVSS

SEQ ID NO: 30449 - protein, 101 aa, Homo sapiens
EASGFTFRNYWMHWVRQTPGKGLVWVSDVHGDGTATMYADSVEGRFTISRDNAKNTLFLQVNSLRVEDTALYYCVRGGTITPGGIFGVDYWGQGTLVTVSS

SEQ ID NO: 30450 - protein, 101 aa, Homo sapiens; identical to SEQ ID NO: 30449

SEQ ID NO: 30451 - protein, 97 aa, Homo sapiens
AASGFPFALYGMSWVRQAPGKGLEWVSTIWSLGTYYADSVKGRFTISRDDSKSTLYLQMNSLTAEDTAVYYCTKWTLISLGNDGAYWGQGTLVTVSS

SEQ ID NO: 30452 - protein, 97 aa, Homo sapiens
AASGFPFALYGMSWVRQAPGKGLEWVSTIWSYGTYYADSVKGRFTISRDDSKSTLYLQMNSLTAEDTAVYYCTKWTLISLGNDGAYWGQGTLVTVSS

SEQ ID NO: 30453 - protein, 97 aa, Homo sapiens; identical to SEQ ID NO: 30451

SEQ ID NO: 30454 - protein, 99 aa, Homo sapiens
VSGDSVSRTIYYWGWIRQPPGSGLEWIGSVYYNGDTEYNPSLKTRVTISVDSSKNQFSLELPSMTAADTAIYFCARRLAGTYQADFDSWGQGLRVTVSS

SEQ ID NO: 30455 - protein, 99 aa, Homo sapiens
VSGDSVSRTIYYWGWIRQPPGSGLEWIGSVYYNGDTDYNPSLKTRVTISVDSSKNQFSLELPSMTAADTAIYFCARRLAGTYQADFDSWGQGLRVTVSS

SEQ ID NO: 30456 - protein, 97 aa, Homo sapiens
AASGITFVHYAMHWVRQAPGKGLEWVSLISADGGTTYYADSVKGRFTISRDNSKNSLYLQMNSLRTEDTALYYCAPARGGYDYFDYWGQGTLVTVSS

SEQ ID NO: 30457 - protein, 97 aa, Homo sapiens
AASGFTFVHHAMHWVRQAPGKGLEWVSLISADGGTTYYADSVKGRFTISRDNSKNSLYLQMNSLRTEDSALYYCAPARGGYDYFDYWGQGTLVTVSS

SEQ ID NO: 30458 - protein, 97 aa, Homo sapiens
AASGFAFVHYAMHWVRQAPGKGLEWVSLISADGGTTHYADSVKGRFTISRDNSKNALYLQMNSLRSEDTALYYCAPARGGYDYFDYWGQGTLVTVSS

SEQ ID NO: 30459 - protein, 99 aa, Homo sapiens
TVSGGSITGGDYYWSWIRQSPGEGLEWIGYIYNSGTTYYRPSLKSRLTISVDTSKNHFSLSLNSVTAADTAVYYCARGGWGKLGYFDFWGQGALVTVSS

SEQ ID NO: 30460 - protein, 99 aa, Homo sapiens
TVSGGSITGGDYYWSWIRQSPGEGLEWIGYIYNSGTTYYRPSLKSRLTISVDTSKNHFSLNLNSVTAADTAVYYCARGGWGKLGYFDFWGQGALVTVSS

SEQ ID NO: 30461 - protein, 99 aa, Homo sapiens; identical to SEQ ID NO: 30460

SEQ ID NO: 30462 - protein, 102 aa, Homo sapiens
APSGFIFSHYGMDWVRQAPGKGLEWVATVWNDGSRTYYADSVKGRFTISRDNSKNTLDLQMNSLRPEDTAVYYCARSVYGDSEGRGGALDPWGQGTLVTVSS

SEQ ID NO: 30463 - protein, 102 aa, Homo sapiens
APSGFIFSHFGMDWVRQAPGKGLEWVATVLNDGSRTYYADSVKGRFTISRDNSKNTLDLQMNSLRPEDTAVYYCARSVYGDSEGRGGALDPWGQGTLVTVSS

SEQ ID NO: 30464 - protein, 98 aa, Homo sapiens
AASGFIFSNHAMYWVRQAPGKGLEWVSTIVPSGDTTYYEDSVKGRFTISRDNSKNKLYLQMHSLRAEDTALYYCVRREAGATLTFDYWGQGTLVTVSS

SEQ ID NO: 30465 - protein, 98 aa, Homo sapiens
AASGFVFSNHAMYWVRQAPGKGLEWVSTIVPSGDTTYYEDSVKGRFTISRDNSKNKLYLQMHSLRAEDTALYYCVRREAGATLTFDYWGQGTLVTVSS

SEQ ID NO: 30466 - protein, 100 aa, Homo sapiens
VSGGFIDNYNYYWAWIRQPPGKGLEWLGGVYYSGNTFYNPSLKSRLTVSADTPKNQFSLTLRSATAADTAVYYCARRFSGNSWAMYFDYWGQGILVTVSS

SEQ ID NO: 30467 - protein, 101 aa, Homo sapiens
SVSGGSITNFSYYWGWIRQPPGKGLQWIGDIYYSGHTYYNPSLKSRLTMSVDTPKNQFSLTLTSATAADTAVYFCARRFSGNSWAMYFDYWGQGALVTVSS

SEQ ID NO: 30468 - protein, 100 aa, Homo sapiens
AASGFVFSSYNMVWVRQAPGKGLEWVSSIGSTSTYKFYADSLKGRFTVSRDNAKNSVYLQMNSLRAEDTAVYYCARIVTETSGETFFDYWGQGTLVTVSS

SEQ ID NO: 30469 - protein, 100 aa, Homo sapiens; identical to SEQ ID NO: 30468

SEQ ID NO: 30470 - protein, 98 aa, Homo sapiens
AASGFTFSTYSMNWVRQAPGKGLEWLSYISGDSSTITYADSVKGRFTISRDNGRNSLFLQMNSLRDGDTAVYYCARGLMATKTDFDYWGQGTLVTASS

SEQ ID NO: 30471 - protein, 98 aa, Homo sapiens
AASGFTFSTYSMNWVRQAPGKGLEWVSYISGDSNTITYADSVKGRFTISRDNGRNSLSLQMNSLRDEDTAVYYCARGLMATKTDFDYWGQGTLVTASS

SEQ ID NO: 30472 - protein, 99 aa, Homo sapiens
TVSGDSISSSSHYWGWVRQPPGKGLDWIGTIYYSGTPYYNPSLKSRLTMSVDTSKNQFSLKLSSVTAADTAVYYCARLKGYSYGLFDYWGQGTLVTVSS

SEQ ID NO: 30473 - protein, 99 aa, Homo sapiens
TVSGGSVSSNNYYWGWIRQPPGKGLEWIGSIYYSGSAYYNPSLKSRVTISVDTSKNQFSLKLGSVTAADTAVYYCARLKGYSYGLFDYWGQGTLVTVSS

SEQ ID NO: 30474 - protein, 93 aa, Homo sapiens
ASGVTIRDIHMRWARQAPGTGLEWVSVVYSNGNTDYADSVKGRFTISRDNSKNSIYLQMNSLRAEDTGIYYCVRDRLGDSEYWGQGTLVTVSS

SEQ ID NO: 30475 - protein, 93 aa, Homo sapiens
ASGVAIRDIHMRWARQAPGTGLEWVSVVYSNGNTDYADSVKGRFTISRDNSKNSIYLQMNRLRAEDTGIYYCVRDRLGDSEYWGQGILVTVSS

SEQ ID NO: 30476 - protein, 93 aa, Homo sapiens
ASGVSIGDIHMRWARQTPGTGLEWVAVIYSNGNTDYADSVKGRFTISRDKSMNAMYLQMNRLRVEDTAMYYCVRDRLGDSEYWGQGALVTVSS

SEQ ID NO: 30477 - protein, 94 aa, Homo sapiens
AASGATINSVHMRWARQAPGTGLEWVSVIYSNGNTDYADSVKGRFTISRDISKNTMYLLMNGLRTEDTGMYYCVRDRLGDSEYWGQGTQVTVSS

SEQ ID NO: 30478 - protein, 99 aa, Homo sapiens
AASGFSVNNNYISWVRQAPGKGLEWVSVIYSSGTTYYGDSVKGRFTISRDNSKNTVYLQMNNLRTEDTAVYWCTRDPGYGTPSGDWFDPWGQGTLVTVS

SEQ ID NO: 30479 - protein, 99 aa, Homo sapiens
AASGFSVSSNYISWVRQAPGKGLEWVSVIYSNGTTYYGDSVKGRFTISRDNSKNTVYLQMNNLRAEDTAVYWCTRDPGYGTPSGDWFDPWGQGTLVTVS

SEQ ID NO: 30480 - protein, 99 aa, Homo sapiens
SVSGGSITDHYWNWIRQSPGKGLEWVGHIRKTESTHQNPSLNSRLTLSLDTSKNQISLKLSSVTAADTAVYYCGRSDTSGNVFVEFDYWGQGILVTVSS

SEQ ID NO: 30481 - protein, 99 aa, Homo sapiens
SVSGGSITDHYWNWIRQSPGKGLEWVGHIRKTESTHQNPSLNSRLTLSLDTSKNQISLKLSSVTAADTAVYYCGRSDTSGNVFVEFDYWGQGTLVTVSS

SEQ ID NO: 30482 - protein, 89 aa, Homo sapiens
VASGFIVTSNYMIWVRQAPGKGLEWVSVIYAGGATYYADSVKGRFTISRDSSKNTLYLQMNSLRAEDTAVYYCTRGDSWGQGTLVTVSS

SEQ ID NO: 30483 - protein, 89 aa, Homo sapiens
VASGFIVTSNYMIWVRQAPGKGLEWVSVMYAGGATYYADSVKGRFTFSRDISKNTLYLHMKSLRAEDTAVYFCTRGDSWGQGTLITVSS

SEQ ID NO: 30484 - protein, 99 aa, Homo sapiens
ASGFTFSTYAMNWVRLAPGRGLEWVSSISRTSSFKYYADSVKGRFSISRDNAMNSVFLQMNSLRADDTGIYYCARDEQKDDVRGWFDPWGQGTLVTVSS

SEQ ID NO: 30485 - protein, 99 aa, Homo sapiens
ASGFTFSTYAMNWVRLAPGRGLEWVSSISRTSSFKYYADSVKGRFTISRDNARSSVILQMNSLRADDTGVYYCARDEQKDDVRGWFDPWGQGTLVTVSS

SEQ ID NO: 30486 - protein, 99 aa, Homo sapiens
KGSGYSFSTYWIGWVRQMPGKGLEWMGLIFPGNSDTRYSPSLQGQVTLSVDRSITTAYLQWSSLKASDTAIYFCGRLFKYNNYWTIDFWGQGTLVTVSS

SEQ ID NO: 30487 - protein, 99 aa, Homo sapiens
KGSGYSFSTYWIGWVRQMPGKGLEWMGLIYPGNSDTRYSPSLQGQVTLSVDRSITTAYLQWSSLKASDTAIYFCGRLFKYNNYWTIDFWGQGTLVTVSS

SEQ ID NO: 30488 - protein, 99 aa, Homo sapiens
AASGFTFTSYSFLWVRQAPGKGLDWVAIISDDGRSRFYADSVKGRFTISRDDSKNTLYLQMNSLRAEDTAVYYCAREGAVVPTSRALDYWGQGTLVTVS

SEQ ID NO: 30489 - protein, 99 aa, Homo sapiens
AASGFTFISYSFLWVRQAPGKGLDWVAIISDDGRSRFYADSVKGRFTISRDDSKNTLYLQMNSLRAEDTAVYYCAREGAVVPTSRALDYWGQGTLVTVS

SEQ ID NO: 30490 - protein, 90 aa, Homo sapiens
TVSGDSLRSAYWSWIRQPPGKGLEWIGYLYYTGTTDYNPSLSSRVTISIDRSKNQFSLKLISVTAADTAVYYCAKEGPDGNWGQGTLVTV

SEQ ID NO: 30491 - protein, 90 aa, Homo sapiens; identical to SEQ ID NO: 30490

SEQ ID NO: 30492 - protein, 92 aa, Homo sapiens
TVAGDSLRSTYWSWIRQPPGKGLEWIGYIYYTGTTDYNPSLSSRVTISIDRSKNQFSLNLISVTAADTAVYYCAKEGPDGNWGQGTRVTVTS

SEQ ID NO: 30493 - protein, 100 aa, Homo sapiens
AASGFDFNYYGMHWVRQPPGKGLEWLALISYDGSKNVYADSVKGRFSISRDNSQNIVYLEMHSLREDDTAVFYCVRGREWLFIEYFFDFWGQGSLVTVSS

SEQ ID NO: 30494 - protein, 100 aa, Homo sapiens
AASGFDFNYYGMHWVRQAPGKGLEWLALISYDGSKNLYADSVKGRFIISRDNSQNILYLQMHSLREDDTAVFYCVRGREWLFIEYFFDFWGQGSLVTVSS

SEQ ID NO: 30495 - protein, 102 aa, Homo sapiens
AASGFTFSDYYMSWIRQAPGKGLEWVSYISSSNTDRNYADSVKGRFTISRDNAKNSLYLQMKSLRAEDTAVYYCARDVSTYGGMSVFAFDIWGQGTMVTVSS

SEQ ID NO: 30496 - protein, 102 aa, Homo sapiens
AASGFTFSDYYMSWIRQAPGKGLEWVSYISSSNTDRNYADSVKGRFTISRDNAKNSLYLQMKNLRAEDTAVYYCARDVSTYGGMSVFAFDIWGQGTMVTVSS

SEQ ID NO: 30497 - protein, 103 aa, Homo sapiens
AASNFALSHYDMSWVRQAPGKAPEWMAFISFSGLDRQYQRSVRGRFTISRDDSRNRLFLAMSSLTTEDTAIYYCARNVRQRDRRPPSFAHHMDVWGKGTAVTV

SEQ ID NO: 30498 - protein, 103 aa, Homo sapiens
AAANFALSHYDMSWVRQAPGKAPEWMAFISFDGLDRQYQRSVRGRFTISRDDSRNRLFLAMSSLTTEDTAIYYCARNVRQRDRRPPSFAHHMDVWGKGTAVTV

SEQ ID NO: 30499 - protein, 103 aa, Homo sapiens
AASNFALSHYDMSWVRQAPGKAPEWMAFISFDGFNRQYQRSVRGRFTISRDDSRNRLFLAMSSLTTEDTAIYYCARNVRQRDRRPPSFAHHMDVWGKGTAVTV

SEQ ID NO: 30500 - protein, 101 aa, Homo sapiens
VGSGFSFGSYWMGWVRQAPGKGLEWVASITPDGGATYYVDSMKGRFTISRDNVKNSVFLQMDTLRAEDTAVYYCEREEYCGSGTCYKSAHWGQGTLVIVSS

SEQ ID NO: 30501 - protein, 101 aa, Homo sapiens
VGSGFSFGSYWMGWVRQAPGKGLEWVASITPDGGATYYVDSMKGRFTISRDNVKNSVFLQMDTLRAEDTAVYYCEREEYCGSGTCYKSAHWGQGTLVTVSS

SEQ ID NO: 30502 - protein, 99 aa, Homo sapiens
AASGFSFGTYAMNWVRQAPGKGLEWVSSLAGGGGDIHYADSVKGRFTISRDNSNNLVYLQMNNLRVEDTAVYYCAKDRTPDGRTEIDYWGQGTLVTVSS

SEQ ID NO: 30503 - protein, 99 aa, Homo sapiens; identical to SEQ ID NO: 30502

SEQ ID NO: 30504 - protein, 106 aa, Homo sapiens
DVSGVSLNDYSWSWVRLFPGNGLEWIGELTHSGSTNYNPSLKSRVSISKEKSVNQFSLKLLSMTAADTALYFCARERVLRFSAPRYNFTRGFFDSWGQGTHVTVSS

SEQ ID NO: 30505 - protein, 106 aa, Homo sapiens
DVSGVSLSDYSWSWVRLFPGKGLEWIAELTYSGSTNYNPSLKGRVTISEEKSVNQFSLKLLSMTAADTGLYFCARERVLRFSAPRYNFTRGFFDSWGQGTHVTVSS

SEQ ID NO: 30506 - protein, 98 aa, Homo sapiens
ASLLSIDNYAMHWVRQDPGKGLEWVALISHDGYHTFYADSVRGRFTISRDDSTDTLFLQMNSLRLEDTAVYYCARDPRKSMVGRYFDRWGQGTKVTVS

SEQ ID NO: 30507 - protein, 99 aa, Homo sapiens
ASLLSIDNYAMHWVRQDPGKGLEWVALISHDGYHTFYADSVRGRFTISRDDSTDTLFLQMNSLRLEDTAVYYCARDPRKSMVGRYFDRWGQGTKVTVSS

SEQ ID NO: 30508 - protein, 95 aa, Homo sapiens
EVSGLTFVAQWMQWVRQVPGKGLLSVARISNDGSDIIYADSVKGRFTISRDNTKSMVYLQMDSLRVDDTGVYYCADGGAVPLGFWGQGTLVTVSS

SEQ ID NO: 30509 - protein, 95 aa, Homo sapiens
EVSGLTFVAQWMQWVRQVPGKGLLSVARISNDGSDIIYADSVKGRFTISRDNTKSMVYLQMDSLRADDTGVYYCADGGAVPLGFWGQGTLVTVSS

SEQ ID NO: 30510 - protein, 95 aa, Homo sapiens; identical to SEQ ID NO: 30509

SEQ ID NO: 30511 - protein, 98 aa, Homo sapiens
ASGYTFTRHAIHWVRQAPGQRLEWMGWINGVNGETKYSQKFQDRVSMTSDTSASTVYMDLSSLRSEDTAVYYCAKGGASPPGNWFDPWGQGTLVTVSS

SEQ ID NO: 30512 - protein, 97 aa, Homo sapiens
SGYTFTRHAIHWVRQAPGEGLEWMGWINGVNGETKYSQKFQDRVSMTRDTSASTAYMDLSSLTSEDTAVYYCAKGGASPPGNWFDPWGQGTLVTVSS

SEQ ID NO: 30513 - protein, 101 aa, Homo sapiens
ISGDSVSRDSAAWDWIRQSPSRGLEWLGRTYYRSKWFTAYAVSVRGRITVIPDTSQNQFSLHLNSVTPEDTAVYYCAREGVSRLNWYFDLWGRGTLVIVSS

SEQ ID NO: 30514 - protein, 101 aa, Homo sapiens
ISGDSVSRDSAAWDWIRQSPSRGLEWLGRTYYRSKWFSAYAESVRSRITVIPDTSQNQFSLHLNSVTPEDTAVYYCAREGVSRLNWYFDLWGRGTLVIVSS

SEQ ID NO: 30515 - protein, 96 aa, Homo sapiens
AASGFSVGDDNVVWVRQAPGKGLEWVSVLYRVGGSAYADSVKGRFTISREKSNNTVFLQMKRLRVEDSAVYYCAKEGAFGDYFENWGQGTLVIVSS

SEQ ID NO: 30516 - protein, 96 aa, Homo sapiens
AASGFTVGDDNVVWVRQAPGKGLEWVSVLYRVGGTAYADSVKGRFTISREKSNNTVFLQMKRLRAEDTAVYYCAKEGAFGDYFENWGQGTLVTVSS

SEQ ID NO: 30517 - protein, 98 aa, Homo sapiens
TVSGASISSSSYFWGWIRQPPGKGLESIGSIYYTGTTLYNPSLKSRVTISVDTSKNQFFLKLNSATAADTAVYYCARRDYGSSQFDYWGQGTLVTVSS

SEQ ID NO: 30518 - protein, 97 aa, Homo sapiens
VSGASIITSGDYWAWIRQPPGKGLESIGSIYFSGTTLYNPSLKSRVTMSVDTSKNQFSLNVNSATAADTAVYYCARRDYGSSQFDYWGQGALVTVSS

SEQ ID NO: 30519 - protein, 102 aa, Homo sapiens
AASGFTFISYGMHWVRQAPGKGLEWVAVVSYDGNDKYYADSVKGRFTISRDNSKHTVYLQTNSLRPEDTAVYYCAKDVTVTTSYYFYYMDGWGKGTTVTVSS

SEQ ID NO: 30520 - protein, 102 aa, Homo sapiens
AASGFTFSNYGMHWVRQAPGKGLEWVAVISYDGSDEYYADSVKGRFTISRDNSKNTLFLQMNSLRAEDTAVYFCAKDVTVTTSYYFYYMDGWGKGTTVTVSS

SEQ ID NO: 30521 - protein, 102 aa, Homo sapiens
AASGFTFSNYGMHWVRQAPGKGLEWVAVISYDGSDKYYADSVKGRFTISRDNSKNTLYLQMNSLRAEDTAVYYCAKDVTVTTSYYFYYMDGWGKGTTVTVSS

SEQ ID NO: 30522 - protein, 92 aa, Homo sapiens
VSGESITSGDNYWSWIRQPPGQGLEWIGYIHSTGNTYYNPSLRSRVTISTSKTQFSLNLTSVTAADTAVYYCARGLAGARYWGQGALVTVSS

SEQ ID NO: 30523 - protein, 92 aa, Homo sapiens
VSGESITSGDNYWSWIRQPPGQGLEWIGYIHSTGNTYYNPSLKSRVTISTSKTQFSLNLTSVTAADTAVYYCARGLAGARYWGQGALVTVSS

SEQ ID NO: 30524 - protein, 92 aa, Homo sapiens
VSGESITSGDYYWSWIRQAPGQGLEWIGYIHSTGNTYYNPSLESRVTISTSKTQFSLNLTSVTAADTAVYYCARGLAGARYWGQGALVTVSS

SEQ ID NO: 30525 - protein, 101 aa, Homo sapiens
AVSGVSISSSNWWSWLRQPPGKGLEWIGEISRDRSPTYNPSLKSRVTISVDWSKNQFSLNLTSMTAADTAVYYCSRRSCPTGSCYYAFDYWSQGTLVTVSS

SEQ ID NO: 30526 - protein, 101 aa, Homo sapiens
AVSGVSISSANWWSWLRQSPNTGLEWIGEISRDRSPTYNPSLKSRVTISVDWSKNHFSLNLTSMTAADTAVYYCSRRSCPTGSCYYAFDYWSQGTLVTVSS

SEQ ID NO: 30527 - protein, 101 aa, Homo sapiens
ASGYTFTQYNIAWVRQAPGQGLEWMGWISGYNGNTKYTQKFQGRVTMAIDTSTSTAFMELRSLTSDDTAVYYCARDVHCAGGSCYMPPDYWGQGTLVSVSS

SEQ ID NO: 30528 - protein, 101 aa, Homo sapiens
ASGYTFTQYNIAWVRQAPGQGLQWVGWISGYNGNTKYTQKFQGRVTMAIDTSTSTAFMELRSLTSDDTAVYYCARDVHCAGGSCYMPPDYWGQGTLVSVSS

SEQ ID NO: 30529 - protein, 99 aa, Homo sapiens
AASGFTFSNSAMHWVRQAPGKGLEWVAVIWPDGSNTYYAGSVRGRVTISRDNSENMLYLDIKSLRGEDTAVYYCTRAAGWTFYYYMDVWGKGTTVTVSS

SEQ ID NO: 30530 - protein, 99 aa, Homo sapiens
AASGFTFSNSAMHWVRQAPGKGLEWLAVIWSDGSNTYYAGSVRGRVTISRDNSENMLYLDIKSLRGEDTAVYYCTRAAGWTFYYYMDVWGKGTTVTVSS

SEQ ID NO: 30531 - protein, 99 aa, Homo sapiens; identical to SEQ ID NO: 30530

SEQ ID NO: 30532 - protein, 94 aa, Homo sapiens
AASGFTFSDYEMNWVRQTPGKGLEWIAYISTSDTIYYADSVQGRFSISRDNDKNSLYLQMNSLRTEDTAVYYCASLGYGHSAFWGQGTLVTVSS

SEQ ID NO: 30533 - protein, 94 aa, Homo sapiens
AASGFTFSNYEMNWVRQTPGKGLEWIAYISTSDTIYYADSVQGRFTISRDNVKNSLFLQMNSLRTEDTAVYYCASLGYGHSAFWGQGTLVTVSS

SEQ ID NO: 30534 - protein, 99 aa, Homo sapiens
AASGFTFSSFAMGWVRQAPGKGLEWVSSLSANGAETFYADSVKGRFTISRDDSESTVSLEMNSLRAEDTAIYYCAKWVVAGDIEYFDYWGQGTLVTVSS

SEQ ID NO: 30535 - protein, 99 aa, Homo sapiens
ATSGFGFSYSAMGWVRQAPGKGLEWVSSLSDDSAHIFYADSVRGRFTISRDNSKSTLYLHMNSLTVEDTAVYYCAKWVVAGDIEYFDYWGQGTPVTVSS

SEQ ID NO: 30536 - protein, 99 aa, Homo sapiens
ATSGFSFSYSAMGWVRQAPGKGLEWVSSLSPDSVHIFYADSVRGRFTISRDNSKDTLYLQMNSLRVEDTAEYYCAKWVVAGDIEYFDYWGQGTLVTVSS

SEQ ID NO: 30537 - protein, 99 aa, Homo sapiens
ATSGFSFSYSAMGWVRQAPGKGLEWVSSLSPDSVHIFYADSVKGRFTISRDNSKDTLYLQMNSLRVDDTAVYYCAKWVVAGDIEYFDYWGQGTLVTVSS

SEQ ID NO: 30538 - protein, 98 aa, Homo sapiens
ATSGFTFSSSAMGWVRQAPGKGLQWVSNLFDSRNIFYADSVQGRFTISRDNSKNMLYLQMNNLRGEDTAVYYCAKWVVAGDIEYFDYWGQGTLVSVSS

SEQ ID NO: 30539 - protein, 99 aa, Homo sapiens
ATSGFSFSYSAMGWVRQAPGKGLEWVSSLSDDSRHIFYSDSVRGRFTISRDNSKNTLWLQMNSLRVEDTAIYYCAKWVVAGDIEYFDYWGQGTLVTVSS

SEQ ID NO: 30540 - protein, 100 aa, Homo sapiens
TVSGGSISSSSYYWGWIRQPPGKGLEWIGNIYYSGSTYHNPSLKSRVTISVDTSKNQFSLKLSSVTAADTAVYYCARHVHRVYEYYFEYWGQGTLVTVSS

SEQ ID NO: 30541 - protein, 100 aa, Homo sapiens
TVSGGSISSSNYYWGWIRQPPGKGLEWIGNIYYSGSTYNNPSLKSRVTISVDTSKNQFSLKLSSVTAADTAVYYCARHVHRVYEYYFEYWGQGTLVTVSS

SEQ ID NO: 30542 - protein, 101 aa, Homo sapiens
AASGFTFSTYGMNWVRQAPGKGLDWVSYITDSGSNRYYADSVRGRFTISRDNAKNSLFLQMSSLRDEDTAVYYCARDIMTFGGRAGAFDSWGQGTLVTVSS

SEQ ID NO: 30543 - protein, 101 aa, Homo sapiens
AASGFTFSSYGMNWVRQAPGKGLDWISYITDSGSNRFYADSVRGRFTISRDNAKNSLFLQMSSLRDEDTAVYYCARDIMTFGGRAGAFDSWGQGTLVTVSS

SEQ ID NO: 30544 - protein, 99 aa, Homo sapiens
GFGSDFPNYWIGWVRQMPGKGLEWMGLIYPGDSDTRYGPPFYGPVTISADKSTATAYLQWTSLRASDSGIYYCVRYGPETMRFTSIDLWGPGTLVTVSS

SEQ ID NO: 30545 - protein, 100 aa, Homo sapiens
KGFGSDFASYWIGWVRQPPGKGLEWMGLIYPGDSDTRYGPPFYGPVTISADKSTATAYLQWTSLRASDSGIYYCVRYGPETMRFTSIDLWGPGTLVTVSS

SEQ ID NO: 30546 - protein, 95 aa, Homo sapiens
AASGFTFTDYSMNWIRQAPGKGLEWVSYISRGAGRMHYPDSVKGRFTISRDNAKNSLYLQMNSLRVEDTAVYYCVRDQGWTFDIWGQGTMVTVSS

SEQ ID NO: 30547 - protein, 95 aa, Homo sapiens
AASGFTFSDYSMNWIRQAPGKGLEWVSYISGGAGRMHYADSVKGRFTISRDNAMNSLYLQMNSLRVEDTAVYYCVRDQGWTFDIWGQGTMVTVSS

SEQ ID NO: 30548 - protein, 97 aa, Homo sapiens
AVSGFNVNGFEMNWIRQAPGKGLEWVSYISTDGATIYHANSVKGRFTISRDGAKNSVYLDMTGLRVDDTAVYFCARGLYHLPPFDFWGQGTPVTVSS

SEQ ID NO: 30549 - protein, 97 aa, Homo sapiens
AVSGFSVYGFEMNWIRQAPGKGLEWISYISVDGGTIYYAHSVNGRFTISRDSANNSVYLQMSGLRTDDTAVYYCARGLYHLPPFDFWGQGTPVTVSS

SEQ ID NO: 30550 - protein, 97 aa, Homo sapiens
AVSGFNVNGFEMNWIRQAPGKGLEWVSYISTDGATIYHANSVKGRFTISRDGAKNWVYLDMTGLRVDDTAVYYCARGLYHLPPFDFWGQGTPVTVSS

SEQ ID NO: 30551 - protein, 102 aa, Homo sapiens
RGSGFTFGDSALNWVRQAPGKGLEWVGLIRSKIHGGTSAYGASVEGRFTISRDDSESIAYLQMNSLKTEDTAVYYCTRDTWVNWQQPCYDYWGQGILVTVSS

SEQ ID NO: 30552 - protein, 102 aa, Homo sapiens
RGSGFTFGDSALNWVRQAPGKGLEWVGLIRSKIHGGTAAYGASVEGRFTISRDDSESIAYLQMNSLKTEDTAVYYCTRDTWVNWQQPCYDYWGQGILVTVSS

SEQ ID NO: 30553 - protein, 102 aa, Homo sapiens
AASGFNFGGYAMHWVRQAPGKGLEWVAVISYDGSTKYYADYVKGRFSISRDNSKNTLYLQMNSLRVEDTAVFYCARDVNGHAAVVGTRMDVWGEGTTATVSS

SEQ ID NO: 30554 - protein, 102 aa, Homo sapiens
AASGFNFGGYAMHWVRQAPGKGLEWVAVISYDGSTKYYADSVKGRFSISRDNSKNTLYLQMNSLRVEDTAVFYCARDVNGHAAVVGTRMDVWGEGTTATVSS

SEQ ID NO: 30555 - protein, 97 aa, Homo sapiens
VSGGSLSSFYWTWIRQPPGKGLEWIGNIYYTGSTNYNPSLKSRVTISVDTSDNQFSLKLNSVTAADTAIYYCARGGVGGEWLFSDYWGQGILVTVSS

SEQ ID NO: 30556 - protein, 97 aa, Homo sapiens
VSGGSLSSFYWTWIRQPPGKGLEWIGNIYYSGSTNYNPSLKSRVTISVDTSDNQFSLRLNSVTAADTAIYYCARGGVGGEWLFSDYWGQGILVTVSS

SEQ ID NO: 30557 - protein, 101 aa, Homo sapiens
VSGGSINSSIYYWGWVRQPPGKGLEWIGTLYYTGSAYTTPSLQSRFNMSMDTSKNQFFLRLASVSAADTAVYYCARISALIAAPGGWFHPWGQGIHVTVSS

SEQ ID NO: 30558 - protein, 101 aa, Homo sapiens
VSGGSINNSIYYWGWVRQPPGKGLEWIGTLYYTGSAYTTPSLQSRFNMSMDTSKNQFFLRLASVSAADTAVYYCARISALIAAPGGWFHPWGQGIHVTVSS

SEQ ID NO: 30559 - protein, 95 aa, Homo sapiens
KDSGHSFARYWMAWVRQRPGKGLEFMGIIFPGDSETRYSPAFQGQVTMSADKSISTVYLEWTSLRPSDTATYYCARLDSNWFDPWGQGTQVTVSS

SEQ ID NO: 30560 - protein, 95 aa, Homo sapiens
KDSGHSFARYWMAWVRQRPGKGLEFMGIIFPGDSETRYSPAFQGQVTMSADKSISTVYLEWTSLRASDTATYYCARLDSNWFDPWGQGTQVTVSS

SEQ ID NO: 30561 - protein, 98 aa, Homo sapiens
TVSGGSMSSYYWTWIRRPPGKGLQWIGDIYYRGGTNYNPSLKGRVTISIDTSNNQHSLKLSSVTAADTAHYYCARHLNFDSGGRLDFWGQGTLVTVSS

SEQ ID NO: 30562 - protein, 98 aa, Homo sapiens; identical to SEQ ID NO: 30561

SEQ ID NO: 30563 - protein, 96 aa, Homo sapiens
AASGFTFSSYYMHWVRQAPGKGLEWVAHISSSGSSIHYADSVRGRFTVSRDNAKNSLYLQMSNLKDEDTAVYYCARDPPGNAFDIWGQGTMVTVSS

SEQ ID NO: 30564 - protein, 95 aa, Homo sapiens
ASGFTFSSYYMHWVRQAPGKGLEWLSHISQSGSSTYYADSVRGRFTISRDNAKNSMYLQMNNLRDEDTAVYYCARDPPGNAFDIWGQGTMVTVSS

SEQ ID NO: 30565 - protein, 101 aa, Homo sapiens
GVYGGPLSGYYWNWIRQSQPPDTGLEWIGEVDHSGISHYNLSLVSRVTISVDTSKRQVSLKVRSVTAADTGVYYCARGVGTVRAGGHMDVWGKGTTVTVSS

SEQ ID NO: 30566 - protein, 99 aa, Homo sapiens
GVYGGSLSGYYWNWIRQPPDTGLQWIGEVDHSGISHYNLSLVSRVTVSVDTSKRQVSLKVRSVTDADTAVYYCARGVGTVRAGGHMDVWGKGTTVTVSS

SEQ ID NO: 30567 - protein, 91 aa, Homo sapiens
AASGVTVSGNYMAWVRQATGEGLEWVSVIYPDDNTYYAESVKGRFTISRDNSKNTGFLQMNSLSADDTAVYFCSFGFFENWGQGTLVTVSS

SEQ ID NO: 30568 - protein, 91 aa, Homo sapiens
AASGVTVSNNYLGWVRQAPGEGLEWVSVIYPDGNTYYADSVKGRFTISRDNFKNTGFLQMNSLSADDTAVYYCSFGFFENWGQGTLVTVSS

SEQ ID NO: 30569 - protein, 103 aa, Homo sapiens
AVYGGSFSEFYWSWIRQAPGKGLEWIAEINNFGSSNYSPSLKSRVTISVDTSKNQFSLEVRSVTAADTAVYYCARGRREYKGYDYGVTWFDPWGQGNLVTVAS

SEQ ID NO: 30570 - protein, 103 aa, Homo sapiens; identical to SEQ ID NO: 30569

SEQ ID NO: 30571 - protein, 95 aa, Homo sapiens
AVYGGSLSGYYWSWIRQPPGKGLEWIGEINHSGSTNFNPSLESRVTISVDTSRNQYSLKVTSVTAADTAVYYCARLDRTYGFDRWGQGTPVTVSS

SEQ ID NO: 30572 - protein, 95 aa, Homo sapiens
AVYGGSLSGYYWSWIRQPPGKGLEWIGEINHSGSSNFNPSLESRVTISVDTSRNQFSLQVTSVTAADTAVYYCARLDRTYGFDRWGQGTPVTVSS

SEQ ID NO: 30573 - protein, 98 aa, Homo sapiens
AASGFSLTSYNMKWVRQAPERGLEWVSTILGTGETYYAESLKGRFTISRDKSQKLVHLQMNSLGVDDTAVYFCVRDKGSGSWYAIDYWGQGVLVTVAS

SEQ ID NO: 30574 - protein, 98 aa, Homo sapiens
AASGFSLTSYNMKWVRQAPGKGLEWVSTILGTGETYYAESFKGRFTISRDNSKKLVHLQMNSLGVEDTAVYFCVRDKGSGSWYAIDYWGQGVLVTVSS

SEQ ID NO: 30575 - protein, 101 aa, Homo sapiens
AASGFTFSSYEMNWVRQAPGKGLEWLSYISSSGSTIYYADSVKGRFTISRDNAKNSLHLQMSSLGAEDTAVYYCARDGQGYCSSTSCYDSWGQGTLVTVSS

SEQ ID NO: 30576 - protein, 101 aa, Homo sapiens
AASGFTFSSYEMNWVRQAPGKGLEWLSYISSSGSTIYYADSVKGRFTISRDNAKNSLHLQMSSLGTEDTAVYYCARDGQGYCSSTSCYDSWGQGTLVTVSS

SEQ ID NO: 30577 - protein, 102 aa, Homo sapiens
TVSGGSISTGDYYWSWIRQYPGKGLEWLGYIYYKGSTYYNPSLKSRVFISVDTSKNQFSLKLNSVTAADTAVYYCARFGSGVATYLNVFDIWGQGTMVTVSS

SEQ ID NO: 30578 - protein, 102 aa, Homo sapiens
TVSGGSISTGDYYWSWIRQYPGKGLEWLGYIYYKGSTYYNPSLKSRVFISVDTSKNQLSLKLNSVTAADTAVYYCARFGSGVATYLNVFDIWGQGTMVTVSS

SEQ ID NO: 30579 - protein, 102 aa, Homo sapiens
TVSGGSISTGDYYWSWIRQYPGKGLEWLGYIYYRGSTYYNPSLKSRVFISVDTSKNQFSLKLNSVTAADTAVYYCARFGSGVATYLNVFDIWGQGTMVTVSS

SEQ ID NO: 30580 - protein, 96 aa, Homo sapiens
ASGSSFSTTATTWVRLAPGKGLEWVSRISDNGRFTYYADSVKGRFTVSRDSSKNTLFLQMTSLRAEDTAIYYCATSGPGVFYYMDAWGKGTTVTVS

SEQ ID NO: 30581 - protein, 96 aa, Homo sapiens; identical to SEQ ID NO: 30580

SEQ ID NO: 30582 - protein, 100 aa, Homo sapiens
AVDGDYISAKTWWTWVRQPPGKGLEWIGQIFQTGATDYNPSLKRRVTISADESKNHFSLTLTSVTAADTAVYYCARVGRDVVVYGAFDLWGRGIMVTVSS

SEQ ID NO: 30583 - protein, 100 aa, Homo sapiens; identical to SEQ ID NO: 30582

SEQ ID NO: 30584 - protein, 105 aa, Homo sapiens
ASGYPFTNFPIHWVRQAPGQSLEWMGWINAANGESDYSQKFQGRVTITRDTSANTAYMELSGLRSEDTAVYFCARDFNSGGAGKYATYFYYMDVWGKGTTVTVSS

SEQ ID NO: 30585 - protein, 105 aa, Homo sapiens
ASGYPFINFPIHWVRQAPGQSLEWMGWINAANGESDYSQKFQGRVTITTDTSANTAYMELSGLRSEDTAVYFCARDFNSGGAGKYATYFYYMDVWGKGTTVTVSS

SEQ ID NO: 30586 - protein, 100 aa, Homo sapiens
VSGYTLTELSMHWVRQAPGKGLEWMGGFDPEDGETIYPQKFQGRVTMTEDTSTDTAYMELNSLRSDDTAVYYCATVIFMVRGTENWFDPWGQGTLVTVSS

SEQ ID NO: 30587 - protein, 100 aa, Homo sapiens
VSRYTLTELSMHWLRQAPGKGLEWMGGFDPEDGKTIYPQKFQGRVTMTEDTSTDTAYMELSSLRSEDTAVYYCATVIFMVRGTENWFDPWGQGTLVTVSS

SEQ ID NO: 30588 - protein, 94 aa, Homo sapiens
AASGFTFSDYWMHWVRQAPGKGLVWVSRINGDGSTTNYADSVRGRFTISRDNAKNTLYLQMNSLRVEDTAVYYCIRSQYYDFYWGQGALVTVSS

SEQ ID NO: 30589 - protein, 94 aa, Homo sapiens
AASGFTFSDYWMHWVRQVPGKGLVWVSRINGDGSTTNYADSVKGRFTISRDNAKNTLYLQMNSLRVEDTAVYYCIRSQYYDFYWGQGALVTVSS

SEQ ID NO: 30590 - protein, 93 aa, Homo sapiens
AVSGFTLSGNTMKWVRQAPGKGLEWVSRLKGSDGTTYYADSVKGRFTISRDISKNTLYLQMNSLRVEDTAVYYCLGAGGGSSWGQGTLVTVSS

SEQ ID NO: 30591 - protein, 93 aa, Homo sapiens
AVSGLTLSGNTMKWVRQAPGKGLEWVSRIKGSDDTTYYADSVKGRFTISKDISKNTLYLQMNSLRVEDTAVYYCLGAGGGSSWGQGTLVTVSS

SEQ ID NO: 30592 - protein, 93 aa, Homo sapiens
AVSGLTLSGNTMKWVRQAPGKGLEWVSRIKGSDGSTYYADSVKGRFTISRDISKNTLYLQMNSLRVEDTAVYYCLGAGGGSSWGQGTLVTVSS

SEQ ID NO: 30593 - protein, 100 aa, Homo sapiens
VVSGLTFSHAWMSWVRHFPGKGLEWVGRIKHDGSTTYAAPVKGRFTMSRDDSKHTMYLQMNTLRTEDTALYYCTHDIYDFSSNFGAFSTWGQGTLVTVSS

SEQ ID NO: 30594 - protein, 100 aa, Homo sapiens
VVSGLTFSHAWMSWVRHFPGKGLEWVGRIKHDGSATYAAPVKGRFTMSRDNSKHTMYLQMNALRTEDTALYYCTHDIYDFSSNFGAFSTWGQGTLVTVSS

SEQ ID NO: 30595 - protein, 100 aa, Homo sapiens; identical to SEQ ID NO: 30594

SEQ ID NO: 30596 - protein, 95 aa, Homo sapiens
ASGYTFTDYYMHWVRQAPGQGLEWMGWINPKSGGTNYAEKFQGWVTVTRDTSISTVYMELSRLTSDDTAVYYCARGEVTFGLDYWGQGTLVTVSS

SEQ ID NO: 30597 - protein, 95 aa, Homo sapiens
ASGYTFIDYYMHWVRQAPGQGLEWMGWINPKSGGTNYAEKFQGWVTVTRDTSVSTVYMEFSRLTSDDTAVYYCARGEVTFGLDYWGQGTLVTVSS

SEQ ID NO: 30598 - protein, 101 aa, Homo sapiens
AASGFTFDEYNMHWVRQVPGKGLEWVALVSWDGTSTYYADSVKGRFTISRDNSKNSLYLQMNNVGIDDTALYRCAGGRSGYYLGGRAFDMWGQGTMVTVSS

SEQ ID NO: 30599 - protein, 100 aa, Homo sapiens
ASGFTFDDYTMHWVRQRPGQGPEWVSLISWDGGSTYYADSVMGRFTISRDNSKNSLYLQMNSLRIDDTALYHCAGGRSGYYLGGRAFDMWGQGTMVTVSS

SEQ ID NO: 30600 - protein, 103 aa, Homo sapiens
AASGFLVNAYYMTWVRQAPGKGLQWIASISHSDKSTYYAESVKGRFTISRDDSKNTLYLQMRSLRGDDTAVYYCARDGKFCQSSNCYSWNDFWGQGTLVTVSS

SEQ ID NO: 30601 - protein, 103 aa, Homo sapiens
AASGFLVNAYYMTWVRQAPGKGLQWIASISHSDKSTYYAESVKGRFTISRDDSKNTLYLQMRSLRADDTAVYYCARDGKFCQSSNCYSWNDFWGQGTLVTVSS

SEQ ID NO: 30602 - protein, 104 aa, Homo sapiens
SGYTFSSYFMHWVRQAPGQGPEWMGVINPNGGSTSHAQKFQGRVTMTMDTSTSTVYMELSSLRSDDTAVYYCARGLDVEMATISYHYSYYMDVWGKGTTVTVSS

SEQ ID NO: 30603 - protein, 104 aa, Homo sapiens; identical to SEQ ID NO: 30602

SEQ ID NO: 30604 - protein, 105 aa, Homo sapiens
ASGYTFSSYFMHWVRQAPGQGPEWMGVINPNGGSTSHAQKFQGRVTMTRDTSTSTVYMELSSLRSEDTAVYYCARGLDVEMATISYHYSYYMDVWGKGTTVTVSS

SEQ ID NO: 30605 - protein, 94 aa, Homo sapiens
AAFGFNFKNFPMFWVRQAPGRGLEWVAFMSVDETKKLYGASAEGRAIITRDNDRRTLFLYMDYMTMEDTGIYFCARGLALGRYMDVWGRGTTVT

SEQ ID NO: 30606 - protein, 94 aa, Homo sapiens
AAFGFDLKRFPMYWVRQAPGRGLEWVAFTSVHEGQKLYGASAEGRAIITRDNDRRTLFLDMDYMTLEDTGVYFCARGLALGRYMDVWGRGTTIT

SEQ ID NO: 30607 - protein, 94 aa, Homo sapiens
AAFGFNFKNFPMFWVRQAPGRGLEWVAFMSGDEGKKLYGASAEGRAIITRDNDRRTLFLHMEYMTMEDTGVYFCARGLALGRYMDVWGRGTTVT

SEQ ID NO: 30608 - protein, 100 aa, Homo sapiens
VTSGFNFGDHGMHWVRQAPGKGLEWVAGLWYDGSKKSYGESVQGRFTISRDNSKNSLFLQMNRLRAEDTAIYYCARQDSDFWSGYLFDLWGRGTLVDVSS

SEQ ID NO: 30609 - protein, 100 aa, Homo sapiens
VTSGFNFGDYGMHWVRQAPGKGLEWVAGLWYDGSKKSYGDSVQGRFIISRDNSKNALYLQMNTLRAEDTAVYYCARQDSDFWSGYLFDLWGRGTLVAVSS

SEQ ID NO: 30610 - protein, 98 aa, Homo sapiens
AASGFTVSSNYMTWVRQPVGKGLEWVSVIFPTGNTYYADSVKDRFVISRDISKNTLYLQMNSLRGEDTAVYYCARAIVPVHRGWFDPWGQGTLVTVSS

SEQ ID NO: 30611 - protein, 98 aa, Homo sapiens
AASGFTVSSNYMTWVRQPAGKGLEWVSVIFPTGNTYYADSVKDRFVISRDISKNTLYLQMNSVRGDDTAVYYCARAIVPVHRGWFDPWGQGTQVTVSS

SEQ ID NO: 30612 - protein, 103 aa, Homo sapiens
AVAGDSISSGDYSWSWIRQPPGKGLEWIGHIHHSGTTYYNPSLKSRVTISIDRPKNQFSLKLTSVTAADTAVYYCARVLGNWYYEDYYYMDVWGRGATVTVSS

SEQ ID NO: 30613 - protein, 103 aa, Homo sapiens
AVSGDSISSGDYSWSWIRQPPGKGLEWIGHIHHSGTTYYNPSLKSRVTISIDRPKNQFSLKLTSVTAADTAVYYCARVLGNWYYEDYYYMDVWGRGATVTVSS

SEQ ID NO: 30614 - protein, 98 aa, Homo sapiens
ASGFTLSSYEVNWVRQAPGKGLEWLSYIKENGDSIYYADSVRGRFTLSRDNANNLVFLQMNALRPEDTAVYYCAREAINCGGDCLDYWGQGTLVTVSS

SEQ ID NO: 30615 - protein, 99 aa, Homo sapiens
VVSGFTFSAYEFNWVRQGPGKGLEWISYISTSGAHKYYADSFRGRFTISRDNAMNSVYLQMNGLRAEDTAIYYCAREAINCGGDCLDYWGQGTLVAVSS

SEQ ID NO: 30616 - protein, 99 aa, Homo sapiens
AASGFTFSSYTINWVRQAPGKGLEWVSSISGSGSVLWYADSVRGRFTISRDNAKNSVSLQMNSLRVEDTAFYYCVRDRVSSSAYHMDVWGNGTTVTVSS

SEQ ID NO: 30617 - protein, 99 aa, Homo sapiens; identical to SEQ ID NO: 30616

SEQ ID NO: 30618 - protein, 98 aa, Homo sapiens
AGSGFNFNFYWMNWVRQVPGKGLVWVARINSDGSHTDYADSVKGRFTISRDNAKNTLFLQMDGLRAEDTAVYYCARIVDYFDNRDAIWGQGTMVTVSS

SEQ ID NO: 30619 - protein, 98 aa, Homo sapiens
AGSGFKFNFYWMNWVRQVPGKGLVWVARINSDGSHSDYADSVKGRFTISRDNAKNTLFLQMDGLRAEDTAVYYCARIVDYFDNRDAIWGQGTMVTVSS

SEQ ID NO: 30620 - protein, 95 aa, Homo sapiens
EASGFAFSTYNMNWVRQAPGKGLEWISFITIGGETVHYAESVKGRFTISRDNAKNSLYLQMNSLRDEDTAVYYCLRDTAWIRDLWGQGSIVTVSS

SEQ ID NO: 30621 - protein, 95 aa, Homo sapiens
EASGFTFSTYNMNWVRQAPGKGLEWVSFITVGGDTIHYADSVKGRFTISRDNAKKSLYLQMNSLRAEDTAVYYCLRDTAWIRDLWGQGTMVTVSS

SEQ ID NO: 30622 - protein, 102 aa, Homo sapiens
SVSGTSISAYYWTWIRQPPGKGLEWIGDIYYRGSTRYNPSLNSRVTMSLDMTQRQVSLKLSSVTAADTAVYYCARFLSSAEGYDYYFYMDVWGGGTTVTVSS

SEQ ID NO: 30623 - protein, 102 aa, Homo sapiens
NVSGTSISAYSWTWIRQTPGKGLEWIGDIYYRGSTRYNPSLNSRVTMSLDMTQRQVSLKLSSVTAADTAVYYCARFLSSAEGYDYYFYMDVWGGGTTVTVSS

SEQ ID NO: 30624 - protein, 102 aa, Homo sapiens
AASGVTVSSDYMSWVRQAPGKGLEWVSVIYRGGETYYTDSVKGRFTISRDNSKNTLYLQMNSLRVEDTALYYCVRGGGAYCGSDCLRTFDIWGQGTLVTVSS

SEQ ID NO: 30625 - protein, 102 aa, Homo sapiens
AASGVTVSRDYMSWVRQAPGKGLEWVSVIYRNGETYYTDSVKGRFTISRDSSKNTLDLQMNSLTLEDTALYYCVRGGGAYCGSDCLRTFDIWGQGTLVTVSS

SEQ ID NO: 30626 - protein, 100 aa, Homo sapiens
ASGNDFTIYAIDWLRQAPGQGLEWVGWVDTNGGKTGQAKTFEGRINITADRSTDTFYLELGNLKPGDTATYYCAREFEGPGGRSWYFDPWGQGTRVTVSS

SEQ ID NO: 30627 - protein, 100 aa, Homo sapiens
ASGNDFTIYAIDWLRQAPGQGLEWVGWVDTKTGKTGQAKTFEGRINITADRSTDTVYLELRNLKPGDTATYYCAREFEGPGGRSWYFDPWGQGTRVTVSS

SEQ ID NO: 30628 - protein, 96 aa, Homo sapiens
AASGFRDTFSASWMHWVRQVPGEGLEWVSRIGDDGSTFYADSVQGRFIISRDIAMNTVHLQMNSLRAEDTALYYCARDRAYSLDEWGQGILVTVSS

SEQ ID NO: 30629 - protein, 96 aa, Homo sapiens
AASGFRDTFSASWMHWVRQIPGEGLEWVSRIGDDGSTFYADSVRGRFIISRDIAMNTVHLQMNSLRAEDTALYYCARDRAYSLDEWGQGILVTVSS

SEQ ID NO: 30630 - protein, 112 aa, Homo sapiens
TVSGGSISSYSWSWIRQPPGKGLEWIGYIYYSGSTFYNPSLKSRVTISVDTSKNQFSLQLSSVTAADTAVYYCARRLRASAAYHNYDFWSGYGDSYYYMDVWGKGTTVTVSS

SEQ ID NO: 30631 - protein, 112 aa, Homo sapiens
TVSGGSISSSSWSWIRQPPGHGLEWIGYIYYSGSTFYNPSLKSRVTISVGTSKNQFSLQLSSVTAADTAVYYCARRLRASAAYHNYDFWSGYGDSYYYMDVWGKGTTVTVSS

SEQ ID NO: 30632 - protein, 112 aa, Homo sapiens
TVSGGSISSSSWSWIRQPPGHGLEWIGYIYYSGSTFYNPSLKSRVTISVDTSKNQFSLQLSSVTAADTAVYYCARRLRASAAYHNYDFWSGYGDSYYYMDVWGKGTTVTVSS

SEQ ID NO: 30633 - protein, 99 aa, Homo sapiens
VASGFTFSNYWMHWVRQVPGKGLLWVSRIDDDGDGITYADSVKGRFTISRNNAENTLYLQMNNLRAEDTAVYYCARGPVKGGHWSGDSWGQGTLVTVSS

SEQ ID NO: 30634 - protein, 99 aa, Homo sapiens
VASGFSFSNYWMHWVRQAPGKGLQWVSRIDDDGDGITYADSVEGRFTISRNNAENTLYLQMNNVRAEDTAVYYCARGPVKGGHWSGDSWGQGTLVAVSS

SEQ ID NO: 30635 - protein, 97 aa, Homo sapiens
AASGFTFSAYYISWIRQAPGKGLEWVSKISAASTYITYADSVKGRFTISRDDAKNSLYLQMNSLRVEDTAVYYCARGVSGHYYMDVWGRGTTVTVSS

SEQ ID NO: 30636 - protein, 97 aa, Homo sapiens; identical to SEQ ID NO: 30635

SEQ ID NO: 30637 - protein, 100 aa, Homo sapiens
SGYTFSNLGISWVRQAPGQGLEWMGWISAYIGTTRYAQKFQDRITLTTDASTSTVYMELRSLRAEDTAMYYCARDPNRRAMTMIDNFDYWGQGSLVTVSS

SEQ ID NO: 30638 - protein, 100 aa, Homo sapiens
SGYTFSNFGISWVRQAPGQGLEWMGWISAYIGTTRYAQKFQDRITLTTDASTSTVYMELRSLGAEDTAMYYCARDPNRRAMTMIDNFDYWGQGSLVTVSS

SEQ ID NO: 30639 - protein, 101 aa, Homo sapiens
ASGYTFTTYAMHWVRQAPGQRLEWMAWINAGNGNTKSSQKFQGRVTITRDTSASTAYMELSGLTSEDTAVYYCARGHPTYSDYDPLLIDYWGRGTLVTVSS

SEQ ID NO: 30640 - protein, 101 aa, Homo sapiens
ASGYTFTTYAMHWVRQAPGQRLEWMAWINAGNVNTKYSQKFQGRVTITRDTSASTAYMELSRLTSEDTAVYYCARGHPTYSDYDPLLIDYWGQGTLVTVSS

SEQ ID NO: 30641 - protein, 92 aa, Homo sapiens
VASGFNFDTYWMTWVRQAPGKGLEWLASMKEDGSKIFYVDSVKGRFTISRDNAKNSLFLEMNSLRAGDTAFYFCANVQHDFWGQGTLVTVSS

SEQ ID NO: 30642 - protein, 92 aa, Homo sapiens
VASGFNFNTYWMTWVRQAPGKGLEWLASMKEDGSKIFYVDSVKGRFTISRDNAKNSLFLEMNSLRAGDTAFYFCANVQHDFWGQGTLVTVSS

SEQ ID NO: 30643 - protein, 92 aa, Homo sapiens
VASGFNFNTYWMTWVRQAPGKGLEWVASMKADGSKIFYVDSVKGRFTISRDNAKNSLFLEMNSLTAGDTAFYFCANVQHDFWGQGTLVTVSS

SEQ ID NO: 30644 - protein, 95 aa, Homo sapiens
AASGFTFSSYALTWVRQAPGKGLEWVSTINNSDGGTYYADSVKGRFTISRDNSKNTLYLQMNSLGAEDTAVYFCARVWSRSYDYWGQGTLVTVSS

SEQ ID NO: 30645 - protein, 95 aa, Homo sapiens
AASGFTFSNYALTWVRQAPGKGLEWVSTINSSGGGTFYADSVKGRFTISRDNSKNTLYLQMNSLRAEDTAVYFCARVWSRSYDYWGQGTLVTVSS

SEQ ID NO: 30646 - protein, 95 aa, Homo sapiens
AASGFTFSSYALTWVRQAPGKGLEWVSSINNNGGGTYYADSVKGRFTISRDNSKNTLYLQMNTLRAEDTAVYFCARVWSRSYDYWGQGTLVTVSS

SEQ ID NO: 30647 - protein, 95 aa, Homo sapiens
AASGFTFSSYALTWVRQAPGKGLEWVSTINNTGGGTYYADSVKGRFTISRDNSKNTLYLQMNSLGAEDTAVYFCARVWSRSYDYWGQGTLVTVSS

SEQ ID NO: 30648 - protein, 99 aa, Homo sapiens
AASGFMFGAYAMTWVRQAPGKGLEWVSSISGSGGSTFYGDYVKGRFTISRDNSKNTLYLQMSSLRVEDTAVYFCAKGWGATPRDYFDYWGQGTLVTVSS

SEQ ID NO: 30649 - protein, 99 aa, Homo sapiens
AGSGFSFRTYAISWVRRAPGKGLEWVSSISGSGGATYYGDSVKGRFTIFRDFSKNTAYLQMNSLRVEDTAVYYCAKGWGATPRDYFDYWGQGTPVTVSS

SEQ ID NO: 30650 - protein, 96 aa, Homo sapiens
TVSGGSMNTYFWSWIRQPPGKGLEWIGWIDYSGTTNYKSSLKSRVTISVDTSKNQFSLNLNSVTAADTAVYYCARGGASSRPFHHWGQGTLVTVSS

SEQ ID NO: 30651 - protein, 96 aa, Homo sapiens
TVSGGSFNTFYWSWIRQPPGKGLEWIGWISYSGSTNYNPSLQSRVTISLDTSKNQFSLKLNSVTAADTAVYYCARGGASSRPFHHWGQGTLVTVSS

SEQ ID NO: 30652 - protein, 99 aa, Homo sapiens
AASGFTFRNYAMSWVRQVPGKGLEWVSALSGSGDRANYAEFVKGRFTISRDNSKNTLYLQMNSLGAEDTALYYCARDRSPSDGWEPDNWGHGTLVTVSS

SEQ ID NO: 30653 - protein, 99 aa, Homo sapiens
AASGFTFRNYAMSWVRQVPGKGLEWVSALSGSGDRANYAEFVKGRFTISRDNSKNTLYLQMNSLGVEDTALYYCARDRSPSDGWEPDNWGHGTLVTVSS

SEQ ID NO: 30654 - protein, 99 aa, Homo sapiens
AASGFTFRNYAMTWVRQAPGKGPEWVSALSNSGDLTYYADSVEGRFTISRDNSKNTLYLQMNSLRAEDTALYHCARDRSPSDGWEPDNWGPGTLVTVSS

SEQ ID NO: 30655 - protein, 97 aa, Homo sapiens
ISGDSVSSNSATWNWIRQSPSRGLEWLGRTYYRSKWSNDYALSVKSRISINPDTSKNQFSLQLNSVTPEDTAVYYCAREQQMKLDHWGQGTLVTVSS

SEQ ID NO: 30656 - protein, 97 aa, Homo sapiens
VSGDSVSTNTVTWNWIRQSPSRGLEWLGRTYYRSKWSNDYALSVKSRISINPDTSKNQFSLQLNSVTPEDTAVYYCAREQQMKLDHWGQGTLVTVSS

SEQ ID NO: 30657 - protein, 99 aa, Homo sapiens
TVSGASINSSHFYWGWIRQSPARGLEWIGHIFYIGTFSYNPSLSSRVTISVDTSKNQFSLKLTSVTAADTAVYYCARRGVAKKGWFDPWGQGTLVTVSS

SEQ ID NO: 30658 - protein, 99 aa, Homo sapiens
TVSGASINSSHFYWGWIRQSPARGLEWIGHIFYIGTFSYNPSLSSRVTISVDTSKNQFSLKVTSVTAADTAVYYCARRGVAKKGWFDPWGQGTLVTVSS

SEQ ID NO: 30659 - protein, 102 aa, Homo sapiens
KASGYIFTHRWIGWVRQMPGKGLEWMGRIYPGDSETTYSPSFEGQVTISADTSITTAYLQWSSLKASDTAMYYCVRHEASYGTFGYHFLDSWGQGTQVTVSS

SEQ ID NO: 30660 - protein, 102 aa, Homo sapiens; identical to SEQ ID NO: 30659

SEQ ID NO: 30661 - protein, 102 aa, Homo sapiens
KASGYIFTHRWIGWVRQMPGKGLEWMGRIYPGDSETTYSPSFEGQVTISVDTSTTTAYLQWSSLKASDTAMYYCVRHEASYGTFGYHFLDSWGQGTQVTVSS

SEQ ID NO: 30662 - protein, 102 aa, Homo sapiens
KASGYIFTHRWIGWVRQMPGKGLEWMGRIYPGDGETTYSPSFEGQVTISADTSLTTAYLQWSSLKASDTAMYYCVRHEASYGTFGYHFLDSWGQGTQVTVSS

SEQ ID NO: 30663 - protein, 97 aa, Homo sapiens
AASGFKFSTHAMTWVRQASGKGLEWVSAISDTGYSTFYADSVKGRFTISRDNSRDTVYLQMNSLTAEDTAVYYCAKRTWRNYYMDVWGKGTTVTVSS

SEQ ID NO: 30664 - protein, 97 aa, Homo sapiens
AASGFKFSTHAMTWVRQASGKGLEWVSAISDIGSSTFYADSVKGRFTISRDNSRDTVYLQMNSLTVGDTAVYYCAKRTWRNYYMDVWGKGATVTVSS

SEQ ID NO: 30665 - protein, 96 aa, Homo sapiens
AASGFKFSTHAMTWVRQASGKGLEWVSAISDIGSSTFYADSVKGRFTISRDNSRDTVYLQMNSLTVGDTAVYYCAKRTWRNYYMDVWGKGPRSPSP

SEQ ID NO: 30666 - protein, 97 aa, Homo sapiens
AASGFKFSTHAMTWVCQASGKGLEWVSAISDIGSSTFYADSVKGRFTISRDNSRDTVYLQMNSLTVGDTAVYYCAKRTWRNYYMDVWGKGATVTVSS

SEQ ID NO: 30667 - protein, 91 aa, Homo sapiens
VVSGLSFRDNWMDWVRQAPGKGLEWVANISPDGSDKNYVDSVKGRFIISRDNAKNSVFLQMDSLRREDTAMYFCSPSLNSWGQGVLVTVSS

SEQ ID NO: 30668 - protein, 91 aa, Homo sapiens; identical to SEQ ID NO: 30667

SEQ ID NO: 30669 - protein, 91 aa, Homo sapiens
AVSGLSFRDNWMDWVRQAPGKGLEWVANINPDGSDKNYVDSVKGRFIISRDNAKNSVFLQMDSLRREDTAMYFCSPSLNSWGQGILVTVSS

SEQ ID NO: 30670 - protein, 91 aa, Homo sapiens
VVSGLSFRDNWMDWVRQAPGKGLEWVANISPDGSDKNYVDSVKGRFIISRDNAKNSVFLQMDSLRREDTAMYFCSPSLNSWGQGILVTVSS

SEQ ID NO: 30671 - protein, 91 aa, Homo sapiens; identical to SEQ ID NO: 30670

SEQ ID NO: 30672 - protein, 90 aa, Homo sapiens
VSGLVFKSNWMDWVRQAPGKGLEWVANIKPDGSEMNYVDSVKGRFTISRDNVKGSLYLDISSLRAEDTAMYYCSPSLNSWGQGVLVTVSS

SEQ ID NO: 30673 - protein, 104 aa, Homo sapiens
TQTLTLTCTFSGFSLTTAEVGVHWIRQPPGKALEWLALIYWNDDNHYSPSLESRLTITKDTSKNQVVLTMTNMDPVDTATYYCAHSSGWVSDYWGQGTLVTVSS

SEQ ID NO: 30674 - protein, 104 aa, Homo sapiens
TQTLTLTCTFSGFSLSTAAVGVQWIRQPPGKALEWLALVYWDDDNHYSPSLKSRLTITKDTSKNQVVLTMINMDPADTATYYCAHSSGWVSDYWGQGTLVTVSS

SEQ ID NO: 30675 - protein, 104 aa, Homo sapiens
TQTLTLTCTFSGFSLTSAEVGVHWIRQPPGKALEWLALIYWNDDNRYSPSLESRLTITKDTSKNQVVLTMTNMAPVDTATYYCAHSSGWVSDYWGQGTLVTVSS

SEQ ID NO: 30676 - protein, 94 aa, Homo sapiens
VASGFTFSSHWMSWVRQAPGKGLEWVANIKGDGSVSFYVDSVKGRFTISRDNAHNSVYLQMNSLRVEDTAVYYCARAVDVGDYWGQGTLVTVSS

SEQ ID NO: 30677 - protein, 94 aa, Homo sapiens
VASGFTFSSHWMSWVRQAAGKGLEWVANIKEDGRVKFYVDSVKGRFTISRDNAQNSVYLQMNSLRVEDTAVYYCARAVDVGDYWGQGTLVTVSS

SEQ ID NO: 30678 - protein, 94 aa, Homo sapiens
VASGFTFSSHWMSWVRQAPGKGLEWVANIKGDGSVSFYVDSVKGRFTISRDNAHNSVYLQMNSLRVEDTAVYYCARAVDVGDYWGQETLVTVSS

SEQ ID NO: 30679 - protein, 94 aa, Homo sapiens
AASGFTFINHWMAWVRQAPGKGLEWVANIKQDGSAKFYVGSVKGRFTISRDNAENSLYLQMNSLTAEDTAVYYCARAVDVGDYFGQGTLVTVSS

SEQ ID NO: 30680 - protein, 92 aa, Homo sapiens
AASGFTFSNSWMSWVRQAPGKGLEWVANIKDDGSGKYYVDSVKGRFTISRDNAKNSMYLQMSSLRAEDTAMYYCATSGGGHWGQGTLVSVSS

SEQ ID NO: 30681 - protein, 92 aa, Homo sapiens
ATFGFIFSTTWMGWVRQAPGKGLEWVAKINPDGSGKAYVDSVKGRFTISRDNAKNSLHLQLNSLRSEDTAVYYCATSGGGHWGQGTLVTVSS

SEQ ID NO: 30682 - protein, 92 aa, Homo sapiens; identical to SEQ ID NO: 30681

SEQ ID NO: 30683 - protein, 92 aa, Homo sapiens
TVSGGSITGYYWSWIRQPPGKGLEWIGCITNTGSTNYNPSLKSRVTISVDTSKNQFSLKLNSVTAADTAVYYCARRGGLDYWGQGTLVTVSS

SEQ ID NO: 30684 - protein, 92 aa, Homo sapiens
TVSGGSISSYYWSWIRQPPGKGLEWIGYIYSNGNANYNPSLKSRVTMSVDTSKNQFSLELTSVTAADTAVYYCARRGGLDYWGRGTLLTVSS

SEQ ID NO: 30685 - protein, 97 aa, Homo sapiens
AASGFSISSYGMHWVRQAPGKGLEWVAVMWHDGSKKYYAEAVKGRFTISRDNSKNTLYLQMDSLRTEDTAVYYCARPGPGYDAFDIWGQGTMVTVSS

SEQ ID NO: 30686 - protein, 97 aa, Homo sapiens
AASGFSISTYGMHWVRQAPGKGLEWVAVMWHDGSKKYYAEAVKGRFTISRDNSKNTLYLQMDSLRTEDTAVYYCARPGPGYDAFDIWGQGTMVTVSS

SEQ ID NO: 30687 - protein, 96 aa, Homo sapiens
AASGFTFSTYGMHWVRQAPGKGLDWVAVIWHDGSKTYYADSVKGRFTISRDISKNTLYLQMNNLRAEDTAVYYCARPGPGYDAFDIWGQGTMVTVS

SEQ ID NO: 30688 - protein, 96 aa, Homo sapiens
AASGFTFSSYGMHWVRQAPGKGLEWVAVIWHDGSKTYYADSVKGRFTISRDISKNTLYLQMNDLRAEDTAVYYCARPGPGYDAFDIWGQGTMVTVS

SEQ ID NO: 30689 - protein, 96 aa, Homo sapiens; identical to SEQ ID NO: 30688

SEQ ID NO: 30690 - protein, 100 aa, Homo sapiens
AASGFTFSTYWMSWVRQAPGKGLEWVANIKQDGSEKYYVDSVKGRFTISRDNARNSLYLQMNSLRAEDTAVYYCARARIAVAGTDYFEYWGQGTLVTVSS

SEQ ID NO: 30691 - protein, 100 aa, Homo sapiens
AASGFTFSSYWMSWVRQAPGKGLEWVANIKQDGSETYYVDSVKGRFTISRDNAKNSLFLQMNSLRAEDTAFYYCARARIAVAGTDYFEYWGQGTLVTVSS

SEQ ID NO: 30692 - protein, 99 aa, Homo sapiens
ASGYTFTSYAIHWVRQAPGQRLEWMGWINAGNGNTRYSQKFQGRLTITWDTSASTAYMDLSSLRSEDTAVYYCARGGEGGYSYGCFDYWGQGTLVTVSS

SEQ ID NO: 30693 - protein, 99 aa, Homo sapiens
ASGYTFTSYAIHWVRQAPGQRLEWMGWINAGNGNTKYSQKFQGRLTITWDTSASTAYMDLSSLRSEDTAVYYCARGGEGGYSYGCFDYWGQGTLVTVSS

SEQ ID NO: 30694 - protein, 99 aa, Homo sapiens
ASGYTFTNYAIHWVRQAPGKRLEWMGWINAGNGNTKYSQKFQGRVTITRDTSASTAYMELSSLRSEDTAVYYCARGGEGGYSYGCFDYWGQGTLVTVSS

SEQ ID NO: 30695 - protein, 93 aa, Homo sapiens
GASGFTFTTYSMNWVRQAPGKGLEWVSSISSRGTSIYYADSVKGRFTISRDNSNNSVFLQMNNVRAEDTAIYFCARAPSSDYWGQGTLVTVSS

SEQ ID NO: 30696 - protein, 93 aa, Homo sapiens
AASDFTFSTYSMNWVRQAPGKGLEWVSLISSTGTYTYYAESVKGRFTISRDNANNSVYLEMNSLRADDTAVYYCARAPSSDYWGQGVPVTVSS

SEQ ID NO: 30697 - protein, 93 aa, Homo sapiens
AASDFTFSTYSMNWVRQAPGKGLEWVSLISSTGTYTYYAESVKGRFTISRDNANKSVYLEMNSLRADDTAVYYCARAPSSDYWGQGVPVTVSS

SEQ ID NO: 30698 - protein, 92 aa, Homo sapiens
VSGVTFRDVWMTWFRQAPGKGLEWVGRIKSEGQGGTTDYAAPVKGRFTISRDESKNILYLQMTSLKTEDTAVYHCTTDHFTWGQGTLVTVSS

SEQ ID NO: 30699 - protein, 93 aa, Homo sapiens
EASGITLSNAWMSWFRQAPGKGLEWVGRIKSKTHGGTTDYAAPVNGRFTISRDDSKNTLFLHMNSLKTEDTAVYYCTTDHFTWGQGTLVTVSS

SEQ ID NO: 30700 - protein, 93 aa, Homo sapiens
EVSGITLSNAWMSWFRQAPGKGLEWVGRIKSKIHGGTTDYAAPVNGRFTISRDDSKNTLFLHMNSLKTEDTAVYYCTTDHFTWGQGTLVTVSS

SEQ ID NO: 30701 - protein, 92 aa, Homo sapiens
ASRFTLSNAWMSWFRQAPGKGLEWVGRIKSKAHGGTIDYAAPVNGRFTISRDDSKNTLFLHMNSLNTEDTAVYYCTTDHFTWGQGTLVTVSS

SEQ ID NO: 30702 - protein, 90 aa, Homo sapiens
AASGFLLRTFWMHWVRQAPGKGLEWVATMNLDGGENYYVDSVKGRFTISRDDAKNSLFLQMNRLRAEDSAVYYCTRGLDVWGRGTAVTVS

SEQ ID NO: 30703 - protein, 91 aa, Homo sapiens
AASGFTFSSPWMNWVRQAPGKGLEWVANINPDGNAQYYVDSVKGRFTISRDNAKNSLYLQMNSLRAEDTAVYYCTRGLDVWGQGTTVTVSS

SEQ ID NO: 30704 - protein, 91 aa, Homo sapiens; identical to SEQ ID NO: 30703

SEQ ID NO: 30705 - protein, 96 aa, Homo sapiens
TVSGGSSSGYYWGWIRQPPGRGPEWIGYMYYSGTPNYSPSLKSRVTISVDTSKNQFSLKLTSVTAADTAVYYCARLGYYSYAMDVWGQGTTVTVSS

SEQ ID NO: 30706 - protein, 96 aa, Homo sapiens
TVSGGSISGYYWGWIRQPPGRGLEWIGYSYYSGTPNYSPSLKSRVTISVDTSKNQFSLKVTSVTAADTAVYYCARLGYYSYAMDVWGQGTTVTVSS

SEQ ID NO: 30707 - protein, 96 aa, Homo sapiens; identical to SEQ ID NO: 30705

SEQ ID NO: 30708 - protein, 96 aa, Homo sapiens
TVSGGPISGYYWGWIRQPPGKALEWIGYLYSSGNPNYSPSLKSRVTISVDMANNRFSLKLTSVIPTDTAVYYCARLGYYSYAMDVWGQGTTITVSS

SEQ ID NO: 30709 - protein, 99 aa, Homo sapiens
ASGYTFTNFDVNWVRQAAGQGLEWVGWMNPGTGRSVSAHKFQGRVIMTRDTSINSAFLELTSLRSDDTAVYYCARRAILGPGSSRFDSWGQGTVVTVAS

SEQ ID NO: 30710 - protein, 99 aa, Homo sapiens
ASGYTFTSYDINWVRRAPGQGLEWMGWMNASTGITLYAQKFQGRVTMTRDTSISTAYLEVRSLTSEDTAVYLCARRAILGPGSSRFDSWGQGTLVTVSS

SEQ ID NO: 30711 - protein, 102 aa, Homo sapiens
TVSGGSISSYYWSWIRQPPGKGLEWIGYIYYSGSTNYNPSLKSRVTISVDTSKNQFSLKLSSVTAADTAVYYCARETYYYDSSGYYNWFDPWGQGTLVTVSS

SEQ ID NO: 30712 - protein, 102 aa, Homo sapiens
TVSGGSISSYYWSWIRQPPGKGLEWIGYIYYSGSTNYNPSLKSRVTISVDTSKNQFSLKLTSVTAADTAVYYCARETYYYDSSGYYNWFDPWGQGTLVTVSS

SEQ ID NO: 30713 - protein, 103 aa, Homo sapiens
AASGFTFSSYGMHWVRQAPGKGLEWVAVIWYDGSNKYYADSVKGRFTISRDNSRNTLYLQMNNLRVEDTAVYYCARVGRDYYDSSGYYPIDYWGQGTLVTVSS

SEQ ID NO: 30714 - protein, 103 aa, Homo sapiens
AASGFTFSSYGMHWVRQAPGKGLEWVAVIWYDGSNKYSADSVKGRFTISRDNSKNTLYLQMNSLRAEDTAVYFCARVGRDYYDSSGYYPIDYWGQGTLVTVSS

SEQ ID NO: 30715 - protein, 103 aa, Homo sapiens
AASGFTFSSYGMHWVRQAPGKGLEWVAVIWYDGSNKYYADSVKGRFTISRDNFKNTLYLQMNTLRAEDTAVYYCARVGRDYYDSSGYYPIDYWGQGSLVTVSS

SEQ ID NO: 30716 - protein, 98 aa, Homo sapiens
AASGFTFSSYWMSWVRQAPGKGLEWVANIKQDGSETYYVDSVKGRFTISRDNAKNSLYLQMNSLRAEDTAVYYCARGGGGDRDAFDIWGQGTMVTVSS

SEQ ID NO: 30717 - protein, 98 aa, Homo sapiens
AASGFTFSTYWMSWVRQAPGKGLEWVANIKQDGSETYYVASVKGRFTISRDNAKNSLYLQMNSLRAEDTAVYYCARGGGGDRDAFDIWGQGTMVTVSS

SEQ ID NO: 30718 - protein, 97 aa, Homo sapiens
ASGFTFSSSAMSWVRQAPGKGLEWVSAISNGDGGSTYYAGSVRGRFTISRDNSKNTLYLQMYSLRAEDSALYYCAKDRLTISAFDIWGQGTMVTVSS

SEQ ID NO: 30719 - protein, 96 aa, Homo sapiens
ASGFTFNNYGMNWVRQAPGKGLEWVSGISGSSRDTYYGDSVKGRFTISRDNSKNILFLQMNSLRADDTALYYCAKDRLTISAFDIWGQGTMVTVSS

SEQ ID NO: 30720 - protein, 97 aa, Homo sapiens
VASGFTFNNYGMSWVRQAPGKGLEWVTGISGSSRDTYYEDSVKGRFTISRDNSKNTLFLQMNSLRADDTALYYCAKDRLTISAFDIWGQGTMVTVSS

SEQ ID NO: 30721 - protein, 99 aa, Homo sapiens
AASGFTFSSYAMSWVRQGPGKGLEWVSALSGSGGRTFYADSVKGRFTISRDNSKNTLFLQMNSLRAEDTAIYYCAKNRGYSGYDPLDYWGQGTLVTVSS

SEQ ID NO: 30722 - protein, 99 aa, Homo sapiens
AASGFTFSSYAMSWVRQAPGKGLEWVSAISGSGASTYYADSVKGRFTFSRDNSKNTLYLQMNSLRAEDTAIYYCAKNRGYSGYDPLDYWGQGTLVTVSS

SEQ ID NO: 30723 - protein, 99 aa, Homo sapiens
ISGDSVSSNSATWNWIRQSPSRGLEWLGRSFFRSKWESVYALSVESRMTIKPDTSQNQFSLQLNSVTPEDSAVYYCARSAYYKEWLDPWGQGTLVTVSS

SEQ ID NO: 30724 - protein, 99 aa, Homo sapiens
ISGDSVSTNTATWNWIRQSPSRGLEWLGRTYYRSRWSTVYAESVKSRITINPDTSRNQFSLHLNSATPEDTAVYYCARSAYYKEWLDPWGQGTLVTVSS

SEQ ID NO: 30725 - protein, 91 aa, Homo sapiens
VGSGFSFSSYWMNWVRQAPRKGLEWVANIKQDGSDKSYVDSVKGRFTISRDNAKNSLYLQMNSLRDEDTAVYYCVRGVDHWGQGTLVTVSS

SEQ ID NO: 30726 - protein, 90 aa, Homo sapiens
VSGFTFSSYWMSWVRQTPGKGLEWAANINEDGSKKYYVDSVKGRFTISRDNTKNVVYLQMNRLTVEDTAVYYCVRGVDHWGQGTLVTVSS

SEQ ID NO: 30727 - protein, 94 aa, Homo sapiens
AATGFTFSIYGMTWVRQAPGKGLEWVSGISGSDASTYYADSVKGRFTISRDNSKNTLYLQMHSLRAEDTAVYYCAKGWQAPDYWGRGTLVTVSS

SEQ ID NO: 30728 - protein, 94 aa, Homo sapiens
AASGFTFSNSAMSWVRQAPGKGLEWVSIISISGGSTYYADSVKGRFTVSRDNSKSTLYLQLNSLRAEDTAVYYCAKGWQAPDYWGQGTLVTVSS

SEQ ID NO: 30729 - protein, 92 aa, Homo sapiens
AASGFTFSNYWMTWVRQAPGKGLEWVANTREDGSEKWYVDSVKGRFTISRDNAKNSLYLQMNSLRAEDTAVYYCAISVGEDWGQGTLVTVSS

SEQ ID NO: 30730 - protein, 92 aa, Homo sapiens
AASGFTFGSYWMTWVRQAPGKGLEWVANIKEDGSAKYYVDSVKGRFTISRDNAKNSLYLQMNSLRAEDTAVYYCAISVGEDWGQGTLVTVSS

SEQ ID NO: 30731 - protein, 92 aa, Homo sapiens
AASGLPFRTWWMAWVRQAPGKGLEWVASIKEDGSARFYVDSVKGRFTISRDNAKSSLYLQMNNLRAEDSAMYYCAISVGEDWGRGTLVTVSS

SEQ ID NO: 30732 - protein, 92 aa, Homo sapiens
AASGLTFGSYWMTWVRQAPGKGLEWVANIKEDGSAKYYVDSVKGRFTISRDNAKNSLYLQMNSLRAEDTAVYYCAISVGEDWGQGTLVTVSS

SEQ ID NO: 30733 - protein, 93 aa, Homo sapiens
ASGYTFTSYNIHWVRQAPGQSPEWMGYINPGNGKTRFSQKFQGRVSITTDTSASTAYMEVYSLTSDDTAVYYCATDRGSFDYWGQGTLVTVSS

SEQ ID NO: 30734 - protein, 93 aa, Homo sapiens
ASGYIFTSYDMHWVRQAPGQRLEWMGRINAGNGKTRYSQKFQGRVTITRDTSATTAYMELRSLTSEDTAVYYCATDRGSFDYWGQGTLVSVSS

SEQ ID NO: 30735 - protein, 93 aa, Homo sapiens; identical to SEQ ID NO: 30734

SEQ ID NO: 30736 - protein, 94 aa, Homo sapiens
ASGYSFTNNAIHWVRQAPGQGLECMGWVYPDSGNTRYSQKFQDRVTFARDTSTSTAYMELYSLRSEDTAVYYCARGSSSGFGYWGQGTLVTVSS

SEQ ID NO: 30737 - protein, 94 aa, Homo sapiens
ASGYIFTGYAVHWVRQAPGQGLEWMGWITTDNGNTRYSQKIQGRVTITRDTSASTAYMELSSLRSEDTAVYYCARGSSSGFGYWGQGTLVTVSS

SEQ ID NO: 30738 - protein, 95 aa, Homo sapiens
AASGFTFSSYWMNWVRQAPGKGLEWVANIKQDGSEKYYVDSVKGRFTISRDNAKNSLYLQMNSLRVEDTALYYCAGGSGWLIDCWGQGTLVTVSS

SEQ ID NO: 30739 - protein, 95 aa, Homo sapiens
AASGFTFGSYWMNWVRQAPGKGLEWVANIKGDGSDNRYVDSVKGRFTISRDNAKNSVYLEMNSLRVEDTAVYYCAGGSGWLIDCWGQGTLVSVSS

SEQ ID NO: 30740 - protein, 90 aa, Homo sapiens
ASGFSFSNFAMTWVRQAPGKGLEGVSFINARGDITDYADPVKGRFTISRDNAKNTLYLQMDSLRAEDTAFYYCASRWHDWGQGTLVTVSS

SEQ ID NO: 30741 - protein, 91 aa, Homo sapiens
VVSGFTFSKNAMNWVRQAPGKGLEWVSGISGSGDSTYYLDPVKGRFTISRDNSKKTLFLQMNSLRAEDTAVYYCASRWHDWGQGTLVTVSS

SEQ ID NO: 30742 - protein, 90 aa, Homo sapiens
VSGFTFSKNAMNWVRQAPGKGLEWVSGISGSGDSTYYLDSVRGRFTISRDNSKSMLFLQMNSLRGDDTAVYYCASRWHDWGQGTLVTVSS

SEQ ID NO: 30743 - protein, 95 aa, Homo sapiens
AASGFTFSSYGMHWVRQAPGKGLEWVAVIWYDGSNKYYADSVKGRFTISRDNSKNTLFLQMNSLRAEDTAVYYCARDWRGDFDYWGQGTLVTVSS

SEQ ID NO: 30744 - protein, 95 aa, Homo sapiens
AASGFTFSNYGMHWVRQAPGKGLEWVAVIWYDGSNKLYADSVKGRFTISRDNSKNTLYLEMNSLRAEDTAVYYCARDWRGDFDYWGQGTLVTVSS

SEQ ID NO: 30745 - protein, 90 aa, Homo sapiens
EASGLTFSKYNIHWVRQAPGKGPEWVALIYYDGNKKYYADSVKGRFTISRDNSKNTLYLQMNSLRTEDTAVYYCSTYEYWGQGTLVTVSS

SEQ ID NO: 30746 - protein, 90 aa, Homo sapiens
AASGLTFSNYNIHWVRQAPGKRLEWVALIYYDGNTRYYADSVKGRFTVSRDNSKSTLYLQMNNLRVEDTAVYYCSTYEYWGQGTLVTVSS

SEQ ID NO: 30747 - protein, 96 aa, Homo sapiens
AASGFTLSSHGMTWVRQAPGKGLEWVSTISARGSTYYADSVKGRFTISRDNSKNTLYLQMNSLTAEDTAVYYCVNYYGSGSYGHYWGQGTLVAVSS

SEQ ID NO: 30748 - protein, 96 aa, Homo sapiens
VASGIAFNTYGMTWVRQAPGKGLEWVSTVGTGDDTLYADSVKGRFTISRDNSKNTLYLQMNSLRVEDTAIYYCVNYYGSGSYGHYWGQGTLVTVSS

SEQ ID NO: 30749 - protein, 97 aa, Homo sapiens
AASGMTFSTYGMTWVRQAPGKGLEWVSTIGKSGDDRFYADSVKGRFTISRDNSRSTLSLQLSSLRAEDTAMYYCVNYYGSGSYGHYWGQGALVTVSS

SEQ ID NO: 30750 - protein, 94 aa, Homo sapiens
SGYSFTNYALHWVRQAPGQRPEWMGWIHPANGNTKYAQDFQGRVTITRDTSATTSYMELSSLKSEDSALYYCARGYSTTYLDYWGQGALVTVSS

SEQ ID NO: 30751 - protein, 95 aa, Homo sapiens
ASGYTFTSYAFHWVRQAPGESLEWLGWIHPGNGDAQYSPRFQGRVTITRDTSASTVYMELSSLNSEDTAVYYCARGYSTTYLDYWGQGALVTVSS

SEQ ID NO: 30752 - protein, 95 aa, Homo sapiens
ASGYTFTSYAFHWVRQAPGESLEWLGWIHPGNGDAQYSPRFQGRVTITRDTSATTVYMELSSLNSEDTAVYYCARGYSTTYLDYWGQGALVTVSS

SEQ ID NO: 30753 - protein, 94 aa, Homo sapiens
SGYSFSNYAIHWVRQAPGQRPEWMGWIHPGNGDAQYSPKFQGRVTITRDSSASVISMEMSRLRPEDTAMYYCARGYSTTYLDYWGQGTLVSVSS

SEQ ID NO: 30754 - protein, 94 aa, Homo sapiens
AASGFTVTYAWMSWVRQAPGKGLEWVGRIESKIDGGTTDYAAPVKGRFIISADDSRNTLFLQMNSLKIEDTAVYYCMTVFGGDWGQGALVTVSS

SEQ ID NO: 30755 - protein, 94 aa, Homo sapiens
AASGFSFSYAWMSWVRQAPGKGLEWVGRIKSKTDGATADYAAPVKGRFTISGDESKNTLYLEMNSLKIEDTAVYYCMTVFGGDWGQGTLVTVSS

SEQ ID NO: 30756 - protein, 93 aa, Homo sapiens
AASGFSFSSYWMSWVRQIPGKGLEWVANMNQDGSVNYHVDSVKGRFTISRDNAKNSLYLQMNSLRAEDTAIYYCATGGWDGYWGQGTLVTVSS

SEQ ID NO: 30757 - protein, 93 aa, Homo sapiens
AASGFTFSTYWMSWVRQAPGKGLEWVANMNQDGSVKYYVDSVKGRFTISRDNAKNSLYLQMNSLTAEDTAIYYCATGGWDGYWGQGTLVTVSS

SEQ ID NO: 30758 - protein, 90 aa, Homo sapiens
VASGFTFSSYDMNWVRQGPGKGLECVSRISGGGDKTYYGDSVKGRFTISRDNSKNTLYLQMSSLTADDTAVYYCGGAWSWGQGTLVTVSS

SEQ ID NO: 30759 - protein, 89 aa, Homo sapiens
AASGLTISRYTMNWLRQAPGKGLEWVSDIKSGGDTYYADSVKGRFAVFRDSSKNTLYLEMNSLRVEDTAVYYCGGAWSWGPGALVTVSS

SEQ ID NO: 30760 - protein, 105 aa, Homo sapiens
AASGFTFSSYIMHWVRQAPGKGLEWVSSISSSNNSIYNSDSLKGRFTISRDNAKKSLYLQMSSLRAEDTAVYYCARERNYVVVVTATPTRYFDYWGQGTLVSVSS

SEQ ID NO: 30761 - protein, 105 aa, Homo sapiens
AASGFTFSSYIMHWVRQAPGKGLEWVSSISSSNNSIYNSDSLKGRFTISRDNAKKSLYLQMSSLRAEDTAVYYCARERNYVVVVTATPTRYFDYWGRGTLVTVSS

SEQ ID NO: 30762 - protein, 100 aa, Homo sapiens
ISGDSVSSNSAAWNWIRQSPSRGLEWLGRTYYRSKWYNDYAVSVKGRITVNPDTSKNQFSLQLSSVTPEDTAVYYCARDPPELHSAFDIWGQGTMVTVSS

SEQ ID NO: 30763 - protein, 100 aa, Homo sapiens
ISGDSVSSSTAAWNWIRQSPSRGLEWLGRTYYRSKWYNDYAESLKGRITVNPDTSKNQFSLQLNSVTPEDTAVYYCARDPPELHSAFDIWGQGTMVTVSS

SEQ ID NO: 30764 - protein, 94 aa, Homo sapiens
AASGFTFSNYAMSWVRQAPGKGLEWVSAISGSGGSTYYADSVKGRFTISRDNSKNTLYLQMNSLRAEDTAVYYCARGIWGSDYWGQGTLVTVSS

SEQ ID NO: 30765 - protein, 94 aa, Homo sapiens
AASGFTFSSYAMSWVRQAPGKGLEWVSAISGSGGSTYYADSVKGRFTISRDNAKNSLYLQMNSLRDEDTAVYYCARGIWGSDYWGQGTLVTVSS

SEQ ID NO: 30766 - protein, 93 aa, Homo sapiens
AASGFTFSSYAMSWVRQAPGKGLEWVSTISGSGGSTYYADSVKGRFTISRDNSKNTLHLQMNSLRAEDTAIYYCAKDHPFDYWGQGTLVTVSS

SEQ ID NO: 30767 - protein, 93 aa, Homo sapiens
AASGFTFSSSAMSWVRQAPRKGLEWVSSISGTGGSTYYTDSVKGRFTISRDNSKNTLYLQMDSLRAEDTAVYYCAKDHPFDYWGQGTLVTVSS

SEQ ID NO: 30768 - protein, 97 aa, Homo sapiens
AASGFTFSSNYMSWVRQAPGKGLEWVSVMTSSDGIASYADSVKGRFTISRDKSKNTLYLQMNSLRAEDTAVYYCAKHLSGTYSFDSWGQGTLVTVSS

SEQ ID NO: 30769 - protein, 98 aa, Homo sapiens
AASGFTFNTYASWVRQAPGKGLEWVSVFTGTTNGGATYYADSVKGRFTVSRDGSTNTLFLHMTTLRAEDTALYYCAKHLSGTYSFDSWGQGTLVTVSS

SEQ ID NO: 30770 - protein, 98 aa, Homo sapiens; identical to SEQ ID NO: 30769

SEQ ID NO: 30771 - protein, 95 aa, Homo sapiens
VSGASITTYYWSWLRQPPGKGLEWIAFIYYSGSTNYNPSLKSRVTISLDTANNQFSLKLRSAIAADTAVYYCARGGASSLPFDLWGQGTLVTVSS

SEQ ID NO: 30772 - protein, 96 aa, Homo sapiens
SVSGGSIRSYYWSWIRQPPGKGLEWIAFIFYDGSTNYNPSLKSRVTISEDTSKNRFSLKLSSVTAADTAVYYCARGGASSLPFDLWGQGTLVTVSS

SEQ ID NO: 30773 - protein, 95 aa, Homo sapiens
AASGFSFSSYWMAWVRQAPGKGLEWMANIKQDGSEKNYVDSVKGRFTISRDNAKNSLYLQMNSLRAEDTAVYYCARDWGGNLDYWGQGTLVTVSS

SEQ ID NO: 30774 - protein, 95 aa, Homo sapiens
AASEFTFGTYWMAWVRQAPGKGPEWVANIKQDGSVKNYVDSVKGRFTISRDNAKNSLYLQMNSLRDEDTAVYYCARDWGGNLDYWGQGTLVTVSS

SEQ ID NO: 30775 - protein, 99 aa, Homo sapiens
AASGFTFSTNDMHWVRQATGKGLEWVSGIGTAGDTYYPGSVKGRFTISRENAKNSLYLQMNSLRAEDTAVYYCARGIPVVRGVISPLDYWGQGTLVTVS

SEQ ID NO: 30776 - protein, 100 aa, Homo sapiens
AASGFTFGTNDMHWVRQSTGKGLEWVSGIGTAYDTYYADSVKGRFTISRENAESSLYLQMNSLRADDTAVYYCARGIPVVRGVISPLDYWGQGALVTVSS

SEQ ID NO: 30777 - protein, 102 aa, Homo sapiens
TVSGGSINTYYWSWIRQPPGKGLEWIGYLHYSGSTNHNPSLKSRVTLSLDKSKNQFSLKLNSVTAADTAVYYCATGGGGIAVAGTGGWFDPWGQGILVTVSS

SEQ ID NO: 30778 - protein, 102 aa, Homo sapiens
SVSGGSISSYFWSWIRQLPGKGLEWIGYIYYTGTTNYNPSLKSRVTISVDTSKNQFSLNLRSVTAADTAVYYCATGGGGIAVAGTGGWFDPWGQGTLVIVSS

SEQ ID NO: 30779 - protein, 102 aa, Homo sapiens
SVSGGFISSYFWSWIRQPPGKGLEWIGYIHYSGTTNYNPSLKSRVTISVDTSKNQFSLNLRSVTAADTAVYYCATGGGGIAVAGTGGWFDPWGQGTLVTVSS

SEQ ID NO: 30780 - protein, 102 aa, Homo sapiens
TVSGASIRSYYWSWIRQSPGKGLEWIGYIHYSGSINCNPSLKSRVTMSVDTSKNQLSLKLNSVTAADTAVYYCATGGGGIAVAGTGGWFDPWGQGTLVTVSS

SEQ ID NO: 30781 - protein, 102 aa, Homo sapiens
TVSGASISTYYWSWIRQSPGKGLEWIGYIHYSGSTNCNPSLKSRVTMSLDTSKNQLSLKLNSVTAADTAVYYCATGGGGIAVAGTGGWFDPWGQGTLVTVSS

SEQ ID NO: 30782 - protein, 102 aa, Homo sapiens; identical to SEQ ID NO: 30781

SEQ ID NO: 30783 - protein, 102 aa, Homo sapiens
TVSGGSINTYYWSWIRQPPGKGLEWIGYLHYSGSTNHNPSLKSRVTLSLDKSKNQFSLKLTSVSAADTAVYYCATGGGGIAVAGTGGWFDPWGQGILVTVSS

SEQ ID NO: 30784 - protein, 97 aa, Homo sapiens
AASGFTFRTYWMTWVRQAPGKGLEWVANINQDGSQRSYVGSVKGRFTISRDNAKNSLYLQMNSLRAEDTGIYYCATNLPYGDSSDHWGQGSLVTVSS

SEQ ID NO: 30785 - protein, 97 aa, Homo sapiens
ATSGFAFRTYWMTWVRQAPGKGLEWVANINQEGSRRSYVESVNGRFTISRDNARNLLYLEMNGLRAEDTGLYYCATNLPYGDSSDHWGQGTRVTVSS

SEQ ID NO: 30786 - protein, 97 aa, Homo sapiens
ATSGFTFRTYWMTWVRQAPGKGLEWVANINQEGSRKSYVDSVNGRFTISRDNAKNSLYLQMNSLRAEDTGVYYCATNLPYGDSSDHWGQGTLVTVSS

SEQ ID NO: 30787 - protein, 98 aa, Homo sapiens
AVYGGSFSGYYWSWIRQPPGKGLEWIGEINHSGSTYYNPSLKSRVTISVDTSKNQFSLKLSSVTAADTAVYYCARHCGGDCSHAFDIWGQGTMVTVSS

SEQ ID NO: 30788 - protein, 98 aa, Homo sapiens
AVYGGSFSGYYWSWIRQPPGKGLEWIGEINHSGSTNYNTSLKSRVTISLDTSKNQFSLKLNSVTAADTAVYYCARHCGGDCSHAFDIWGQGTMVTVSS

SEQ ID NO: 30789 - protein, 91 aa, Homo sapiens
SGYTFTNYPIHWMRQGPGQRPEWMGWINAGNGNTKFSQKFQGRVTITRDTSASTAYMELSSLRSEDTAVYYCASGEWFDYWGQGTLVTVSS

SEQ ID NO: 30790 - protein, 91 aa, Homo sapiens
SGYTFTTYPIHWMRQAPGQRLEWMGWINAGNGNTKYSQKLQGRVTITRDTFASTANMELSSLRFEDTAVYYCASGEWFDYWGQGTLVTVSS

SEQ ID NO: 30791 - protein, 91 aa, Homo sapiens
SGYIFTTYPIHWVRQAPGQRLEWMGWINAGNGNTKFSQKFQGRVTITRDTSATTAYMELSSLRFEDTAIYYCASGEWFDYWGQGTPVTVSS

SEQ ID NO: 30792 - protein, 91 aa, Homo sapiens
SGYTFTTYPIHWMRQAPGQRLEWMGWINAGNGNTKFSQKFQGRVTITRDTSASTAYMELSSLRSEDTAVYYCASGEWFDYWGQGTLVTVSS

SEQ ID NO: 30793 - protein, 91 aa, Homo sapiens
ASGYSYSNFPIHWVRQAPGQRLEWMGWINAGNRNRKYSQNFRDRVTITWDTSATTGFMDLSSLRSEDTAVYYCASGEWFDYWGQGTLVTVS

SEQ ID NO: 30794 - protein, 91 aa, Homo sapiens
SGYTFTTYPIHWMRQAPGQRLEWMGWINAGKGNTKFSQKFQGRVTITRDTSASTAYMELSSLRSEDTAIYYCASGEWFDYWGQGTLVTVSS

SEQ ID NO: 30795 - protein, 91 aa, Homo sapiens
SGYTFTTYPIHWMRQAPGQSLEWVGWINAGNGNTKFSQKFQGRVSITRDTSASTAYMELTSLRSEDTAVYYCASGEWFDYWGQGTLVTVSS

SEQ ID NO: 30796 - protein, 91 aa, Homo sapiens
SGYIFTTYPIHWVRQAPGQRLEWMGWINTGNGNTKFSQKFQGRVTITRDTSATTAYMELSSLRFEDTAIYYCASGEWFDYWGQGTPVTVSS

SEQ ID NO: 30797 - protein, 91 aa, Homo sapiens
SGYIFTTYPIHWVRQAPGQRLEWMGWINAGNGNTKFSQRFQGRVTITRDTSATTAYMELSSLRFEDTAIYYCASGEWFDYWGQGTPVTVSS

SEQ ID NO: 30798 - protein, 95 aa, Homo sapiens
AASGFTFSHNAMAWVRQAPGKGLEWVSGIGSDNNKLYGNSVKGRFTVSRDNSKNMLYLQMNSLRAEDTAVYYCVKDILGWAFDYWGQGSLVTVSS

SEQ ID NO: 30799 - protein, 95 aa, Homo sapiens
AASGFTFSTNAMAWVRQGPGKGLEWVSGIGSDGNKLYGDSVRGRFTVSRDNSKNALFLQMHSLRAEDTAVYYCVKDILGWAFDYWGQGTLVTVSS

SEQ ID NO: 30800 - protein, 95 aa, Homo sapiens
AASGFTFSTNAMAWVRQGPGKGLEWVSGIGSDGNKLYGDSVRGRFTVSRDNSKNALFLQMHSLRAEDTAVYYCVKDILGWAFDYWGQGILVTVSS

SEQ ID NO: 30801 - protein, 95 aa, Homo sapiens
AASGFTFSTNAMAWVRQGPGKSLEWVSGIGSDGNKLYGDSVRGRFTVSRDNSKNALFLQMHSLRAEDTAVYYCVKDILGWAFDYWGQGTLVTVSS

SEQ ID NO: 30802 - protein, 95 aa, Homo sapiens
AASGFTFSSYAMSWVRQAPGKGLEWVSGIGSDGNKLYGDSVRGRFTVSRDNSKNALFLQMHSLRAEDTAVYYCVKDILGWAFDYWGQGTLVTVSS

SEQ ID NO: 30803 - protein, 95 aa, Homo sapiens
AASGFTFSTNAMAWVRQGPGKGLEWVSGIDSDGNKLYGDSVRGRFTVSRDNSKNALFLQMHSLRAEDTAVYYCVKDILGWAFDYWGQGTLVTVSS

SEQ ID NO: 30804 - protein, 95 aa, Homo sapiens
AASGFTFSTNAMTWVRQGPGKGLEWVSGIGSDGNKLYGDSVRGRFTVSRDNSKNALFLQMHSLRAEDTAVYYCVKDILGWAFDYWGQGTLVTVSS

SEQ ID NO: 30805 - protein, 96 aa, Homo sapiens
AASGFTFSTHWMHWVRQTPEKGLVWVSHINSDGSGTSYADSVKGRFTISRDNAKNTLYLQMNSLRAEDTALYYCARDRPGDGIDYWGQGSLVTVSS

SEQ ID NO: 30806 - protein, 96 aa, Homo sapiens
AASGFTFSSHWMHWVRQAPGKGLVWVSHIESDGIRTSYGDSVKGRFTISRDNAKNTLYLQMNSLRAEDTAVYYCARDRPGDGIDYWGQGTLVTVSS

SEQ ID NO: 30807 - protein, 96 aa, Homo sapiens
AASGFTFSSNWMHWVRQVPGKGLMWVSHINSDGSGTSYADSVKGRFTISRDNAKNMVYLQMNSLRDEDTALYYCARDRPGDGIDYWGQGTLVTVSS

SEQ ID NO: 30808 - protein, 91 aa, Homo sapiens
AASGFTFTGRWMSWVRQAPGEGLEWVANIRPDGSENSYLDSVKGRFTISRDDSKNSLYLQMNSLRADDTAVYYCARDNFDIRGQGTLVTVS

SEQ ID NO: 30809 - protein, 92 aa, Homo sapiens
AASGFTFSGRWMSWVRQAPGKGLQWVANIKEDGSDKSYVDSVKGRFTISRDDAKNSLYLQMNSLRADDTAIYYCARDNFDIRGQGTLVTVSS

SEQ ID NO: 30810 - protein, 92 aa, Homo sapiens
AASGFTFSRSWLSWVRQAPGKGLEWVANINPDGSDKSYVDSVTGRFTISRDNAQNSLFLQMNSLRAEDTAIYYCARDNFDIRGQGTMVTVSS

SEQ ID NO: 30811 - protein, 92 aa, Homo sapiens; identical to SEQ ID NO: 30810

SEQ ID NO: 30812 - protein, 92 aa, Homo sapiens
AASGFTFSGHWMSWVRQAPGKGLEWVANIKEDGSDKSYVDSVKGRFTISRDDAKNSLYLQMNSLRADDTAMYYCARDNFDIRGQGTLVTVSS

SEQ ID NO: 30813 - protein, 96 aa, Homo sapiens
AVSGFSLSSYWMSWVRQAPGKGLEWVANIMQDGNGKYYVDSVKGRFTISRDNAKRSLYLQMNSLRAEDTAVYYCARLGAAAGTDYWGQGTLVTVSS

SEQ ID NO: 30814 - protein, 96 aa, Homo sapiens
AVSGFKISSYWMSWVRQAPGKGLEWVANIKRDGSEKYNVDFVKGRFIISRDNGKNSLFLQMNSLRAEDTAVYSCARLGAAAGTDYWGQGALVTVSS

SEQ ID NO: 30815 - protein, 105 aa, Homo sapiens
AASGFTFSSYAMHWVRRAPGRGLEWVAVILYDGSNKYYADSVKGRFTISRDNSKNTLYLQMNSLRAEDTAMFYCARAPGYCSGDTCYSAYYFDYWGQGTLVTVSS

SEQ ID NO: 30816 - protein, 105 aa, Homo sapiens
AASGFTFSSYAMHWVRRAPGRGLEWVAVILYDGSNKYYADSVKGRFTISRDNSKNTLYLQMNNLRAEDTAVFYCARAPGYCSGDTCYSAYYFDYWGQGTLVTVSS

SEQ ID NO: 30817 - protein, 99 aa, Homo sapiens
ASGYTFTFTSNTIHWVRQAPGQRLEWMGLINGDNDNTQYSQKFQGRITITIDTSASTAYMELSSLRSEDTAVYYCARGIHSGSYLFDYWGQGTLVTVSS

SEQ ID NO: 30818 - protein, 97 aa, Homo sapiens
ASGYTFANYPIHWVRQAPGQRLEWMGWVNVANDYTHSPPRFQGRVTITRDTSASTAYMELSSLRYEDTAVYFCARGIHSGSYLFDYWGQGTLVTVSS

SEQ ID NO: 30819 - protein, 97 aa, Homo sapiens
AGSGFTFSSFAMSWVRQAPGKGLEWVSGISNIGSSTYYADSVKGRFTISRDNSKNTLYLQMNSLRAEDTAVYYCVKVLERYGNFDYWGQGNLVTVSS

SEQ ID NO: 30820 - protein, 97 aa, Homo sapiens
AASGFTFSNYAMTWVRQAPGKGLEWVSAISATGGNTYYPDSVKGRFTISRDNSKNTLFLQMNSLRAEDAAVYFCVKVLERYGNFDYWGQGTLVTVSS

SEQ ID NO: 30821 - protein, 100 aa, Homo sapiens
AASGFTFSDYSMNWVRQAPGKGLEWVSYISSSSSAIYYADSVKGRFTISRDNAKNSLYLQMNSLKDDDTAVYYCARDGGRYSGTYLNDYWGQGTLVTVSS

SEQ ID NO: 30822 - protein, 100 aa, Homo sapiens
AASGFTFGTYSMNWVRQAPGKGLEWVSYISSSSSAIYYADSVKGRFTISRDNAKDSLFLQMNSLRDEDTALYYCARDGGRYSGTYLNDYWGQGTLVTVSS

SEQ ID NO: 30823 - protein, 95 aa, Homo sapiens
TVSGGSISSYYWSWIRQPPGEGLEWIAYITNSGSTHHNPSLKSRVTMSLDTSKNQFALKLNSVTAADTAVYYCARHSSDWSFDYWGQGTLVTVSS

SEQ ID NO: 30824 - protein, 95 aa, Homo sapiens
TVSGASISTYYWSWIRQPPGKGPEWIAYLYYGGNTNYNPSLKSRVTMSVDTSKNQFSLKLSSVTAADTAVYYCARHSSDWSFDYWGQGTLVTVSS

SEQ ID NO: 30825 - protein, 95 aa, Homo sapiens
AASGFTFSNYWMHWVRQAPGKGLEWVANIKPDGSENFYVDSVKGRFTISRDNAKNSLYLQMNSLRAEDTAVYYCVRAVGSSDCYWGQGTLVTVSS

SEQ ID NO: 30826 - protein, 95 aa, Homo sapiens
AASGFTFSSYWMNWVRQAPGKGLEWVANIKQDGSQKYYLDSVRGRFTISRDNAENSVYLQMDSLRAEDTAVYYCVRAVGSSDCYWGQGILVTVSS

SEQ ID NO: 30827 - protein, 95 aa, Homo sapiens
AASGFTFINYWMHWVRQAPGKGLEWVANIKPDGSEKFYVDSVKGRFTISRDNAKNSLYLQMNSLRAEDTAVYYCVRAVGSSDCYWGQGILVTVSS

SEQ ID NO: 30828 - protein, 97 aa, Homo sapiens
EASKYSFSSYWMSWVRQVPGKGLEWVANINQDGSEKHNVASVKGRFSISRDNTKNSLYLQMNSLRAEDTAVYYCAGCGGDCYTIDHWGQGTLVTVSS

SEQ ID NO: 30829 - protein, 97 aa, Homo sapiens
AASKYSFISYWMSWVRQAPGKGLEWVANINQDGSEKHYVDSVKGRFSISRDNTKNSLFLQMNSLRAEDTAVYYCAGCGGDCYTIDHWGQGTLVTVSS

SEQ ID NO: 30830 - protein, 97 aa, Homo sapiens
AASKYSFSSYWMSWVRQVPGKGLEWVANINQDGSEKHNVDSVKGRFSISRDNTKNSLYLQMNSLRAEDTAVYYCAGCGGDCYTIDHWGQGTLVTVSS

SEQ ID NO: 30831 - protein, 97 aa, Homo sapiens
AASKYSFSSYWMSWVRQAPGKGLEWVANINQDGSEKHYVDSVKGRFSISRDNTKNSLYLQMISLRAEDTAVYYCAGCGGDCYTIDHWGQGTLVTVSS

SEQ ID NO: 30832 - protein, 97 aa, Homo sapiens; identical to SEQ ID NO: 30828

SEQ ID NO: 30833 - protein, 97 aa, Homo sapiens; identical to SEQ ID NO: 30830

SEQ ID NO: 30834 - protein, 97 aa, Homo sapiens
AASKYSFSSYWMSWVRQSPGKGLEWVANINQDGSEKHYVDSVTGRFSISRDNTKNSLYLQMNSLRAEDTAVYYCAGCGGDCYTIDHWGQGTLVTVSS

SEQ ID NO: 30835 - protein, 97 aa, Homo sapiens
AASKYSFSSYWMSWVRQVPGKGLEWVANINQDGSEKHNADSVKGRFSITRDNTKNSLFLQMNSLRTEDTAVYYCAGCGGDCYTIDHWGQGTLVTVSS

SEQ ID NO: 30836 - protein, 97 aa, Homo sapiens
AASKYSFSSYWMSWVRQAPGEGLEWVANIKQDGSEKHYVDSVKGRFSISRDNAKNSLYLQMNSLRAEDSAVYYCAGCGGDCYTIDHWGQGTLVTVSS

SEQ ID NO: 30837 - protein, 97 aa, Homo sapiens
AASKYSFSSYWMSWVRQAPGKGLEWVANINQDGSEKHYVDSVKGRFSISRDNTKNSLYLQMNSLRAEDTAVYYCAGCGGDCYTIDHWGQGTLVTVSS

SEQ ID NO: 30838 - protein, 97 aa, Homo sapiens; identical to SEQ ID NO: 30837

SEQ ID NO: 30839 - protein, 97 aa, Homo sapiens; identical to SEQ ID NO: 30830

SEQ ID NO: 30840 - protein, 97 aa, Homo sapiens
AASKYSFSSYWMSWVRQPPGKGLEWVANINQDGSEKHYVDSVTGRFSISRDNTKNSLYLQMNSLRAEDTAVYYCAGCGGDCYTIDHWGQGTLVTVSS

SEQ ID NO: 30841 - protein, 97 aa, Homo sapiens; identical to SEQ ID NO: 30840

SEQ ID NO: 30842 - protein, 97 aa, Homo sapiens
AASKYSFSSYWMSWVRQAPGKGLEWVANIRQDGNEKHYVDSVKGRFSISRDNAKNSLYLQMNSLRAEDTAFYYCAGCGGDCYTIDHWGQGTLVTVSS

SEQ ID NO: 30843 - protein, 97 aa, Homo sapiens
AASKYSFSSYWMSWVRQAPGEGLEWVANIKQDGSETHYVDSVKGRFSISRDNAKNSLYLQMNSLRAEDTAVYYCAGCGGDCYTIDHWGQGTLVTVSS

SEQ ID NO: 30844 - protein, 97 aa, Homo sapiens
AASKYSFSSYWMSWVRQAPGKGLEWVANIKQDGSEKHYVDSVKGRFSISRDNAKNSLYLQMNSLRAEDTAVYYCAGCGGDCYTIDHWGQGTLVTVSS

SEQ ID NO: 30845 - protein, 97 aa, Homo sapiens
AASKYSFSSYWMSWVRQAPGEGLEWVANIKQDGSEKHYVDSVKGRFSISRDNAKNSLYLQMNSLRAEDTAVYYCAGCGGDCYTIDHWGQGTLVTVSS

SEQ ID NO: 30846 - protein, 97 aa, Homo sapiens; identical to SEQ ID NO: 30828

SEQ ID NO: 30847 - protein, 97 aa, Homo sapiens
VASKYSFGSYWMSWVRQAPGKGLEWVANIKQDGSEKHYVDSVKGRFSISRDNTKNSLYLQMNSLRAEDTAVYYCAGCGGDCYTIDHWGQGTLVTVSS

SEQ ID NO: 30848 - protein, 97 aa, Homo sapiens
AASKYSFSNYWMSWVRQAPGKGLEWVANIKQDGSEKHYVDSVKGRFSISRDNAKNSLYLQMNSLRAEDTAVYYCAGCGGDCYTIDHWGQGTLVTVSS

SEQ ID NO: 30849 - protein, 97 aa, Homo sapiens; identical to SEQ ID NO: 30840

SEQ ID NO: 30850 - protein, 97 aa, Homo sapiens
AASKYSFSSYWMSWVRQVPGKGLEWVANINQDGSEKHNADSVKGRFSISRDNTKNSLYLQMNSLRAEDTAVYYCAGCGGDCYTIDHWGQGTLVTVSS

SEQ ID NO: 30851 - protein, 97 aa, Homo sapiens
AASKYSFSSYWMSWVRQAPGKGLEWVANIKQDGSEKHYVDSVRGRFSISRDNAKNSLYLQMNSLRAEDTAVYYCAGCGGDCYTIDHWGQGTLVTVSS

SEQ ID NO: 30852 - protein, 97 aa, Homo sapiens
EASKYSFSSYWMSWVRQVPGKGLEWVANINQDGSEKHNVASVKGRFSISRDNTKNSLYLQMNSLRVEDTAVYYCAGCGGDCYTIDHWGQGTLVTVSS

SEQ ID NO: 30853 - protein, 97 aa, Homo sapiens
AASEYSFSSYWMSWVRQAPGRGLEWVANINQDGSEKHYVDSVKGRFSISRDNTKNSLYLQMNSLRAEDTAVYYCAGCGGDCYTIDHWGQGTLVTVSS

SEQ ID NO: 30854 - protein, 97 aa, Homo sapiens
AASKYSFSSYWMSWVRQVPGKGLEWVANINQDGSEKYSVDSVKGRFSISRDNTENSLYLQMNSLRAEDTAVYYCAGCGGDCYTIDHWGQGTLVTVSS

SEQ ID NO: 30855 - protein, 97 aa, Homo sapiens
AASKYSFSSYWMSWVRQAPGKGLEWVANIKQDGSENHYVDSVKGRFSISRDNAKNSLYLQMNSLRAEDTAVYYCAGCGGDCYTIDHWGQGTLVTVSS

SEQ ID NO: 30856 - protein, 97 aa, Homo sapiens
AASKYSFSSYWMSWVRQAPGKGLEWVANIKQDGSEKHYVDSVKGRFSISRDNAKSSLYLQMNSLRAEDTAVYYCAGCGGDCYTIDHWGQGTLVTVSS

SEQ ID NO: 30857 - protein, 97 aa, Homo sapiens
AASKYSFSSYWMSWVRQVPGKGLEWGANINQDGSEKHNADSVKGRFSITRDNTKNSLFLQMNSLRTEDTAVYYCAGCGGDCYTIDHWGQGTLVTVSS

SEQ ID NO: 30858 - protein, 97 aa, Homo sapiens
AASKYSFSSYWMSWVRQAPGKGLEWVANIKQDGSEKHYVDSVKGRFSISRDNAKNSLYLQMSSLRAEDTAVYYCAGCGGDCYTIDHWGQGTLVTVSS

SEQ ID NO: 30859 - protein, 97 aa, Homo sapiens; identical to SEQ ID NO: 30840

SEQ ID NO: 30860 - protein, 97 aa, Homo sapiens
AASKYSFISYWMSWVRQAPGKGLEWVANINQDGSEKHYVDSAKGRFSISRDNTKNSLFLQMNSLRAEDTAVYYCAGCGGDCYTIDHWGQGTLVTVSS

SEQ ID NO: 30861 - protein, 97 aa, Homo sapiens; identical to SEQ ID NO: 30830

SEQ ID NO: 30862 - protein, 97 aa, Homo sapiens; identical to SEQ ID NO: 30828

SEQ ID NO: 30863 - protein, 97 aa, Homo sapiens; identical to SEQ ID NO: 30834

SEQ ID NO: 30864 - protein, 97 aa, Homo sapiens; identical to SEQ ID NO: 30830

SEQ ID NO: 30865 - protein, 97 aa, Homo sapiens
AASKYSFSNYWMSWVRQAPGKGLEWVANINQDGSEKHNVDSVKGRFSISRDNTKNSLYLQMNSLRAEDTAVYYCAGCGGDCYTIDHWGQGTLVTVSS

SEQ ID NO: 30866 - protein, 97 aa, Homo sapiens; identical to SEQ ID NO: 30835

SEQ ID NO: 30867 - protein, 97 aa, Homo sapiens
AASKYSFSNYWMSWVRQAPGKGLEWVANINQDGSEKHYVDSVKGRFSISRDNTKNSLYLQMNSLRAEDTAVYYCAGCGGDCYTIDHWGQGTLVTVSS

SEQ ID NO: 30868 - protein, 97 aa, Homo sapiens
EASKYSFSSYWMSWVRQVPGKGREWVANINQDGSEKHNVASVKGRFSISRDNTKNSLYLQMNSLRAEDTAVYYCAGCGGDCYTIDHWGQGTLVTVSS

SEQ ID NO: 30869 - protein, 97 aa, Homo sapiens; identical to SEQ ID NO: 30836

SEQ ID NO: 30870 - protein, 97 aa, Homo sapiens; identical to SEQ ID NO: 30828

SEQ ID NO: 30871 - protein, 97 aa, Homo sapiens; identical to SEQ ID NO: 30844

SEQ ID NO: 30872 - protein, 97 aa, Homo sapiens; identical to SEQ ID NO: 30830

SEQ ID NO: 30873 - protein, 97 aa, Homo sapiens; identical to SEQ ID NO: 30844

SEQ ID NO: 30874 - protein, 97 aa, Homo sapiens; identical to SEQ ID NO: 30831

SEQ ID NO: 30875 - protein, 97 aa, Homo sapiens; identical to SEQ ID NO: 30844

SEQ ID NO: 30876 - protein, 97 aa, Homo sapiens; identical to SEQ ID NO: 30844

SEQ ID NO: 30877 - protein, 97 aa, Homo sapiens
AASKYSFSSYWMSWVRQAPGQGLEWVANIKQDGSEKHYVDSVKGRFSISRDNAKSSLYLQMNSLRAEDAAFYYCAGCGGDCYTIDHWGQGTLVTVSS

SEQ ID NO: 30878 - protein, 97 aa, Homo sapiens
AASKYNFGSYWMSWVRQSPGKGLEWVANINQDGSEKNYVDSVTGRFSISRDNTRNSLYLQMSSLRVEDTAVYYCAGCGGDCYTIDHWGQGTLVTVSS

SEQ ID NO: 30879 - protein, 97 aa, Homo sapiens; identical to SEQ ID NO: 30829

SEQ ID NO: 30880 - protein, 97 aa, Homo sapiens; identical to SEQ ID NO: 30840

SEQ ID NO: 30881 - protein, 97 aa, Homo sapiens
AASGFTFSNYWVTWVRQAPGMGLECVANINQDGSEKHYVDSVKGRFTISRDNARNSQYLQMNSLRVEDTAVYYCAGCGGDCYTIDHWGQGTLVTVSS

SEQ ID NO: 30882 - protein, 97 aa, Homo sapiens; identical to SEQ ID NO: 30844

SEQ ID NO: 30883 - protein, 97 aa, Homo sapiens; identical to SEQ ID NO: 30828

SEQ ID NO: 30884 - protein, 97 aa, Homo sapiens; identical to SEQ ID NO: 30844

SEQ ID NO: 30885 - protein, 97 aa, Homo sapiens; identical to SEQ ID NO: 30844

SEQ ID NO: 30886 - protein, 97 aa, Homo sapiens
AASKYSFSSYWMSWVRQAPGKGLEWVANIKQDGSEKHYVDSVKGRFSISRDNAKNSLYLQMNSLRAEDTAFYYCAGCGGDCYTIDHWGQGTLVTVSS

SEQ ID NO: 30887 - protein, 97 aa, Homo sapiens; identical to SEQ ID NO: 30843

SEQ ID NO: 30888 - protein, 97 aa, Homo sapiens; identical to SEQ ID NO: 30837

SEQ ID NO: 30889 - protein, 96 aa, Homo sapiens
ASKYSFSSYWMSWVRQVPGKGLEWVANINQDGSEKHNADSVKGRFSITRDNTKNSLFLQMNSLRTEDTAVYYCAGCGGDCYTIDHWGQGTLVTVSS

SEQ ID NO: 30890 - protein, 100 aa, Homo sapiens
KGSGYRFADYWIAWVRQVPGKGLEWMGIIYPDDSEVKYSPSFQGQVTISVDESITTAYLQWTSLKASDTAVYYCARFSGPRLAYNWFDPWGQGTLVTVSS

SEQ ID NO: 30891 - protein, 100 aa, Homo sapiens
KGYGYGFYGYWIAWVRQMSGKGLEWMGIIYPDDSRTIYSPSFQGQVTISADKSIDTAYLQWSSLKASDTAMYYCARFSGPRLAYNWFDPWGQGTLVIVSS

SEQ ID NO: 30892 - protein, 94 aa, Homo sapiens
VSGGSITYNNYFWGWVRQPPGKGLEWIGSIYHSGSSFYNPSLKSRVTVSVDTSKNQFSLKVTSVTAADTAVYYCARWWNYFDYWGQGALVTVSS

SEQ ID NO: 30893 - protein, 94 aa, Homo sapiens; identical to SEQ ID NO: 30892

SEQ ID NO: 30894 - protein, 95 aa, Homo sapiens
TVSGGSISNSHYYWVWIRQPPGKGLEWIGSMFYSASTYYNPSLKSRVTISGDASKNQFSLKLTSVTAADTALYFCARWWNYFDYWGQGTLVTVSS

SEQ ID NO: 30895 - protein, 93 aa, Homo sapiens
AASGFTFSSYEMSWVRQAPGRGLEWVSHISSSGSNTYYADSVKGRFTISRDNAKNSLYLQMNSLSAEDTAVYYCARLRGFDYWGQGILVTVSS

SEQ ID NO: 30896 - protein, 93 aa, Homo sapiens
AASGFTFSSYEMNWVRQAPGKGLEWLSYISSSGSTIYYADSVMGRFTISRDNAKNSLYLQMNSLRAEDTAVYYCARLRGFDYWGQGTLVTVSS

SEQ ID NO: 30897 - protein, 98 aa, Homo sapiens
TGSGFTFGDYAMSWVRQAPGEGLEWVGFFRSKTYGGTTEYAASVKGRFTISRDDSKSITYLQMNSLKTEDTAVYYCTRDPYYYGMDVWGQGATVTVSS

SEQ ID NO: 30898 - protein, 98 aa, Homo sapiens
TGSGFTFGDYAMSWVRQAPGKGLEWVGFFRSKTYGGTTEYAASVKGRFTISRDDSKSIAYLQMNSLKTEDTAVYYCTRDPYYYGMDVWGQGTTVTVSS

SEQ ID NO: 30899 - protein, 98 aa, Homo sapiens
TGSGFTFGDYAMSWVRQAPGKGLEWVGFFGSKTYGGTTEYAASVKGRFTISRDDSKSIAYLQMNSLKTEDTAVYYCTRDPYYYGMDVWGQGTTVTVSS

SEQ ID NO: 30900 - protein, 98 aa, Homo sapiens
TASGFTFGDHAMSWVRQAPGKGLDWVAFIRSKANGGTTEYAASVKGRFIISRDDSKSIAYLQMNSLKTEDTGVYYCTRDPYYYGMDVWGQGTTVTVSS

SEQ ID NO: 30901 - protein, 98 aa, Homo sapiens
TGSGFIFGDYAMSWVRQAPGEGLEWVGFFRSKTYGGTTEYAASVKGRFTISRDDSKSIAYLQMNSLKTEDTAVYYCTRDPYYYGMDVWGQGTTVTVSS

SEQ ID NO: 30902 - protein, 98 aa, Homo sapiens; identical to SEQ ID NO: 30898

SEQ ID NO: 30903 - protein, 91 aa, Homo sapiens
AASGLIVNTYEMNWVRQAPGKGLEWVAFMSQSGDDIHYAGSVTGRFGITRDNALNLIYLEMNSLKAEDTAVYYCTASDDYWGQGTLVTVSS

SEQ ID NO: 30904 - protein, 91 aa, Homo sapiens
AASGFSFSSYEMNWVRQTAGKGLEWISSISGSGTSIYYADSVEGRFTISRDNAKNSLSLEMNSLRDEDTGVYYCTASDDYWGQGALVTVSS

SEQ ID NO: 30905 - protein, 94 aa, Homo sapiens
VSGFTVSSTSMSWVRQAPGKGLAWVSIIETGGKTLYADSVRGRFTISRDNSKNTLYLQMNSLRVDDTAVYYCARDGSQRSFQHWGQGTLVTVSS

SEQ ID NO: 30906 - protein, 94 aa, Homo sapiens
VSGFTVSSVSMSWVRQAPGKGLAWVSIIESANNAHYADSVKGRFTISRDNSRNTLYLQMSSLRAEDTAVYYCARDGSQRSFQHWGQGTLVTVSS

SEQ ID NO: 30907 - protein, 95 aa, Homo sapiens
AVSGFTVSSVFMSWVRQAPGKGLAWVSIIESAGNAHYADSVKGRFTISRDNSRNTLYLQMSSLRAEDTAVYYCARDGSQRSFQHWGQGTLVTVSS

SEQ ID NO: 30908 - protein, 95 aa, Homo sapiens
AVSGFTVSSTSMSWVRQAPGKGLAWVSIIETGGKTFYADSVRGRFTISRDNSKNTLYLQMDSLRADDTAVYYCARDGSQRSFQHWGQGTLVTVSS

SEQ ID NO: 30909 - protein, 94 aa, Homo sapiens; identical to SEQ ID NO: 30905

SEQ ID NO: 30910 - protein, 94 aa, Homo sapiens
VSGFTVSSTSMSWVRQAPGKGLAWVSIIETGGKTLYADSVRGRFTISRDNSKNTLYLQMNSLRADDTAVYYCARDGSQRSFQHWGQGTLVTVSS

SEQ ID NO: 30911 - protein, 95 aa, Homo sapiens
AVSGFTVNSVSLSWVRQAPGKGLAWVSTIESAGNAHYADSVKGRFTISRDNSRNTLHLQMTRLRAEDTAVYYCARDGSQRSFQHWGQGTLVTVSS

SEQ ID NO: 30912 - protein, 95 aa, Homo sapiens
AASGFTVRSNYMSWVRQAPGKGLAWVSLIETGGSTYYADSVKGRFTISRDDSKNTLLLQMNSLRVEDTAVYYCARDGSQRSFQHWGQGTLVTVSS

SEQ ID NO: 30913 - protein, 95 aa, Homo sapiens; identical to SEQ ID NO: 30912

SEQ ID NO: 30914 - protein, 95 aa, Homo sapiens
AASGFTVSSNYMSWVRQAPGKGLAWVSIIESGGNTYYADSVKGRFTISRDNSKNTLYLRMNSLRAEDTAVYYCARDGSQRSFQHWGQGTLVTVSS

SEQ ID NO: 30915 - protein, 95 aa, Homo sapiens
AVSGFTVSSVSLSWVRQAPGKGLAWVSTIESAGNAHYADSVKGRFTISRDNSRNTLHLQMSRLRAEDTAVYYCARDGSQRSFQHWGQGTLVTVSS

SEQ ID NO: 30916 - protein, 95 aa, Homo sapiens
AASGFTVSSNYMSWVRQAPGKGLEWVSILYTGGNTYYADSVKGRFTISRDSTKNTVYLQMTSLRVEDTAVYYCARDGSQRSFQHWGQGTLVTVSS

SEQ ID NO: 30917 - protein, 95 aa, Homo sapiens; identical to SEQ ID NO: 30912

SEQ ID NO: 30918 - protein, 95 aa, Homo sapiens
AASGFTVRSNYMSWVRQAPGKGLAWVSIIQSGGSTYYADSVKGRFTISRDDSKNTLLLQMNSLRVEDTAVYYCARDGSQRSFQHWGQGTLVTVSS

SEQ ID NO: 30919 - protein, 97 aa, Homo sapiens
ASGYTFTNYYMHWVRQAPGQGLEWMGIIKPSDSSTAYAQNFQGRVIMTRDTSTTTVYMELSSLSSDDTAIYYCARDRTNGWGAFDIWGQGTLVTVSS

SEQ ID NO: 30920 - protein, 97 aa, Homo sapiens
ASGYTFTNYYMHWVRQAPGQGLEWMGIIKPSDSSTAYTENFQGRVIMTRDTSTTTVYMELSSLRSDDTAIYYCARDRTNGWGAFDIWGQGTLVTVSS

SEQ ID NO: 30921 - protein, 97 aa, Homo sapiens
ASGYTFTNYYMHWVRQAPGQRLEWMGIIKPSDSSTAYAQNFQGRVIMTRDTSTTTVYMELTSLSSDDTAIYYCARDRTNGWGAFDIWGQGTLVTVSS

SEQ ID NO: 30922 - protein, 97 aa, Homo sapiens
ASGYTFTNYYMHWVRQAPGQGLEWMGIIKPSDSSTTYAQNFQGRVIMTRDTSTTTVYMELSSLSSDDTAIYYCARDRTNGWGAFDIWGQGTLVTVSS

SEQ ID NO: 30923 - protein, 97 aa, Homo sapiens
ASGYTFTNYYMHWVRQAPGQGLEWMGIIKPSDSSTAYTQNFQGRVIMTRDTSTTTVYMELSSLRSDDTAIYYCARDRTNGWGAFDIWGQGTLVTVSS

SEQ ID NO: 30924 - protein, 97 aa, Homo sapiens; identical to SEQ ID NO: 30923

SEQ ID NO: 30925 - protein, 97 aa, Homo sapiens
ASGYTFTNYYMHWVRQAPGQGLEWMGIIKPSDGSTSYAQNFQGRVIMTRDTSTTTVYMELSSLRSDDTAIYYCARDRTNGWGAFDIWGQGTLVTVSS

SEQ ID NO: 30926 - protein, 97 aa, Homo sapiens
ASGYTFTSYYMHWVRQAPGQGLEWMGIIDPSGGSTSYAQNFQGRVTLTRDTSTSTVYMELSSLRSEDTAVFYCARDRTNGWGAFDIWGQGTMVTVSS

SEQ ID NO: 30927 - protein, 96 aa, Homo sapiens
AASGFTFSPYGMTWVRQAPGKGLEFVSVIYTGGTRTNYAESVKGRFTVSRDDSKSTVYLQMNDLRVEDTAIYYCARDGSEWSRDYWGQGTLVTVSS

SEQ ID NO: 30928 - protein, 96 aa, Homo sapiens
AASGFTFSPYGMTWVRQAPGKGLEFVSVIYTGGTRTNYAESVKGRFTVSRDDSKGTLYLQMNDLRVEDTAIYYCARDGSEWSRDYWGQGTLVTVSS

SEQ ID NO: 30929 - protein, 95 aa, Homo sapiens
ASGFMFSSSGMTWVRQAPGKGLEWVSTIYSSGSPTSYADSVKGRFTVSRDNSKNMVYLQLSSLRVEDTAIYYCARDGSEWSRDYWGQGTLVTVSS

SEQ ID NO: 30930 - protein, 97 aa, Homo sapiens
AASGFTFSSSAMSWVRQAPGMGLEWVSVISASGGTTYYADSVKGRFTISRDNSESTVYLQMNSLRAEDTAVYYCASRGHTLGYFDYWGQGTLVTVSS

SEQ ID NO: 30931 - protein, 97 aa, Homo sapiens
AVSGFTFSSSAMTWVRQAPAKGLEWVSTISGNGGSTYHADSVKGRFTISRDNSKNTVYLEMNSLRAEDTALYYCASRGHTLGYFDYWGQGTVVTVSS

SEQ ID NO: 30932 - protein, 94 aa, Homo sapiens
AASGFTFSDYWMVWVRLAPGKGLEWVGNINQIGTEYHYADSVKGRFTISRDNAQNSLSLQMNGLRAEDTAVYYCARDARYSDFWGQGTLVSVSS

SEQ ID NO: 30933 - protein, 94 aa, Homo sapiens
AASGFTFSTYWMVWVRQAPGKGLEWVGNINQDGSDKYYVDSVKGRFTISRDNAKNSLYLQMNSLRAEDTAVYFCARDARYSDFWGQGTLVTVSS

SEQ ID NO: 30934 - protein, 97 aa, Homo sapiens
AVYGGSFSDYWWTWIRQPPGKGLEWVGEINHSGSTNYNPALKSRVAISVDTSKNQFSLKLSSVTAADTAIYYCARGGGDLQPDFDYWSQGSLVTVSS

SEQ ID NO: 30935 - protein, 97 aa, Homo sapiens
AVYGGSFNDYWWTWIRQPPGKGLEWVGEISHSGSTNYNPALKSRVAISVDTSKNQFSLKLTSVTAADTAVYYCARGGGDLQPDFDYWGQGSLVTVSS

SEQ ID NO: 30936 - protein, 97 aa, Homo sapiens
AVYGGSFSDYWWTWIRQPPGKGLEWVGEINHSGSTNYNPALKSRVAISVDTSKNQFSLKLSSITAADTAVYYCARGGGDLQPDFDYWGQGSLVTVSS

SEQ ID NO: 30937 - protein, 97 aa, Homo sapiens
AVYGGSFSDYWWTWIRQPPGKGLEWVGEINHSGSTNYNPALKSRVAISVDTSKNQFSLKLSSVTAADTAVYYCARGGGDLQPDFDYWGQGSLVTVSS

SEQ ID NO: 30938 - protein, 97 aa, Homo sapiens
AVYGGSFSDYWWTWIRQPPGKGLEWVGEINHIGSTNFNPALSSRVAISVDTSKSQFSLKLSSVTAADTAVYYCARGGGDLQPDFDYWGQGSLVTVSS

SEQ ID NO: 30939 - protein, 97 aa, Homo sapiens
AVYGGSFSDYWWTWIRQPPGKGLEWVGEINHSGSTNYNPALKSRVAISVDTSKNQFSLKLTSVTAADTAVYYCARGGGDLQPDFDYWGQGSLVTVSS

SEQ ID NO: 30940 - protein, 96 aa, Homo sapiens
VYGGSFSDYWWTWIRQPPGKGLEWVGEINHSGSTNYNPALKSRVAISVDTSKNQFSLKLSSITAADTAVYYCARGGGDLQPDFDYWGQGSLVTVSS

SEQ ID NO: 30941 - protein, 97 aa, Homo sapiens
AVYGGSFSDYWWTWIRQPPGKGLEWVGEIAHSGSTNYNPALESRATISVDTAKNQFSLKLNSVTAADTAVYYCARGGGDLQPDFDYWGQGSLVTVSS

SEQ ID NO: 30942 - protein, 97 aa, Homo sapiens
AVYGGSFNEHYWTWIRQPPGKGLEWIGDIDHGGVTNYNPSLKSRVTISVDTSKNQFSLRLSSVTAADTAVYYCARGGGDLQPDFDYWGQGTLVTVSS

SEQ ID NO: 30943 - protein, 97 aa, Homo sapiens
AVYGGSFSDYWWTWIRQPPGKGLEWVGEINHSGSTNYNPALKSRVAISVDTSKNQFSLKVSSVTAADTAVYYCARGGGDLQPDFDYWGQGSLVTVSS

SEQ ID NO: 30944 - protein, 95 aa, Homo sapiens
GVFGGAFSGYHWTWIRQPPGKGLEWIGEINHGGSTNYNPSLKSRLTMLVDTSKRQFSLRLSSVTAADTAVYYCARGGFGELLNFWGQGTLVTVSS

SEQ ID NO: 30945 - protein, 95 aa, Homo sapiens
AVSGGAFSGYYWTWIRQAPGKGLEWIGEINHSGSSNYNPSLKSRVSISVDTSKKHFSLKLTSVTAADTAVYFCARGGFGELLNFWGQGTLVTVSS

SEQ ID NO: 30946 - protein, 95 aa, Homo sapiens
AVSGGAFSGYYWTWIRQAPGKGLEWIGEINHSGSSNYNPSLKSRVSISVDTSKNHFSLKLTSVTAADTAVYFCARGGFGELLNFWGQGTLVTVSS

SEQ ID NO: 30947 - protein, 90 aa, Homo sapiens
ASGFTLSTNWIHWVRQVPGKGLVWVSRVNEDGSGTSYADSVKGRFTVSRDEARNTVSLQMNSLRGDDTAVYYCTTIFDFWGQGTLVTVSS

SEQ ID NO: 30948 - protein, 91 aa, Homo sapiens
AASGFNFRNYWMHWVRQAPGEGLVWVSRVNVDGSDTSYADSVKGRFTMSRDNAKNTVSLQMNSLRAEDTAVYYCTTIFDFWGQGNLVTVSS

SEQ ID NO: 30949 - protein, 91 aa, Homo sapiens
ATSGVIFTNYWMHWVRQGPGEGLVWVARIDGYGSGTSYADSVKGRFTISRDNAKNTVSLQMNSLRAEDTAVYYCTTIFDFWGQGNLVTVSS

SEQ ID NO: 30950 - protein, 91 aa, Homo sapiens
AASGFTFTNYWMHWVRQAPGEGLVWVSRIDGLGSGTSYADSVKGRFTISRDNAKNTVSLQMNSLRAEDTAVYYCTTIFDFWGQGNLVTVSS

SEQ ID NO: 30951 - protein, 91 aa, Homo sapiens
AASGFTFTNYWMHWVRQAPGEGLVWVSRINGDGSGTSYADSVKGRFTISRDNAKNTVSLQMNSLRAEDTAVYYCTTIFDFWGQGNLVTVSS

SEQ ID NO: 30952 - protein, 98 aa, Homo sapiens
KGSGYRFSSYWIGWVRQMPGKGLEVMGIIYPGDSDTKYSPSFQGQVTISADKSISTAYLQWNSLQASDTAMYFCARLSIAVSGDFDFWGQGTLVTVSS

SEQ ID NO: 30953 - protein, 98 aa, Homo sapiens
KGSGYSFSNYWIGWVRQMPGRGLELMGIVYPGDSDPTYSPSFQGLVTISADKSTSTAFLQWSSLKASDTAMYYCARLSIAVSGDFDFWGQGTLVTVSS

SEQ ID NO: 30954 - protein, 98 aa, Homo sapiens
KGSGYRFSSYWIGWVRQMPGKGLEVMGIIYPGDSETKYSPSFQGQVSISADKSITTAYLQWNSLQASDTAMYFCARLSIAVSGDFDFWGQGTLVTVSS

SEQ ID NO: 30955 - protein, 94 aa, Homo sapiens
AASGFTFSNYWLHWVRQVPGKGLVWVSSIRGDGADTNYADSLKGRVTISRDNAKSTLYLQMNSLRAEDTAVYYCAREANSFDIWGQGTLVTVSS

SEQ ID NO: 30956 - protein, 94 aa, Homo sapiens; identical to SEQ ID NO: 30955

SEQ ID NO: 30957 - protein, 94 aa, Homo sapiens
VASGFTFSSHWMHWVRQSPGRGLVWVSSIRFDGGDSNYADFVKGRFTISRDNAQNTVSLEMNILRDEDTAVYYCAREANSFDIWGQGTMVTVSS

SEQ ID NO: 30958 - protein, 97 aa, Homo sapiens
AASGFIVSGNYMSWVRQAPGKGLECVTVIFIGGTTYYADSVKGRFTISRDNSQNTLYLQMNSLRAEDTAVYYCATRPNGDYPYFDYWGQGTLVTVSS

SEQ ID NO: 30959 - protein, 97 aa, Homo sapiens
AASGFTVSRKYMTWVRQAPGKGLEWVSLIYSGGSTSYADSVKGRFTISRDNSRNTLYLQMNSLRAEDTAVYYCATRPNGDYPYFDYWGQGTLVTVSS

SEQ ID NO: 30960 - protein, 97 aa, Homo sapiens
AASGFTVSRKYMSWVRQAPGKGLEWVSLIYSGGSTSYADSVKGRFTISRDNSRNTLYLQMNSLRAEDTAVYYCATRPNGDYPYFDYWGQGTLVTVSS

SEQ ID NO: 30961 - protein, 94 aa, Homo sapiens
AASGFTFSDYTLGWVRQAPGEGLQWVSAIISDFSTFYADSVKGRFTISRDNSKNRLFLQMDNLGADDTALYYCAQRVEGAFHEWGQGTVVTVSS

SEQ ID NO: 30962 - protein, 95 aa, Homo sapiens
AASGFTFNVYTMGWVRQAPGGGLEWVAAMISSGARADYADSVRGRFSISRDNSKNTLSLQMNSLRADDTAVYFCAQRVEGAFHEWGQGTLVTVSS

SEQ ID NO: 30963 - protein, 98 aa, Homo sapiens
AASGFTFSNYWMHWVRQAPGKGLVWVSRVKFDGSTTNYADSVKGRFTISRDNAKNTLFLQMNSLRVEDTAVYYCTRDLVLGSGSSDYWGQGTLVTVSS

SEQ ID NO: 30964 - protein, 98 aa, Homo sapiens
AASGFVFSHNWMHWVRQAPGKGLAWVARINEDETTTNYADSVKGRFTISRDNAKNTLYLQMNSLRVDDTAVYHCTRDLVLGSGSSDYWGQGTLVTVSS

SEQ ID NO: 30965 - protein, 98 aa, Homo sapiens
AASGFTFSGSAMHWVRQASGKGLEWVGRIRSKANSYATAYAESVKGRFTISRDDSKNTAYLQMNSLKTEDTAVYYCTRQAYTVTPDYWGQGTLVTVSS

SEQ ID NO: 30966 - protein, 98 aa, Homo sapiens
AASGFTFSGAAMHWVRQASGKGLEWVGRIRSKGNNYATAYAASVKGRFTISRDDSKNTAYLQMNSLKTEDTAVYYCTRQAYTVTPDYWGQGTLVTVSS

SEQ ID NO: 30967 - protein, 98 aa, Homo sapiens
AASGFTFSDSAMHWVRQASGKGLEWVGRVRSKANSYATAYAASVKGRFTISRDDSKSTAFLQMNGLKIEDTAVYYCTRQAYTVTPDYWGQGTLVVVSS

SEQ ID NO: 30968 - protein, 98 aa, Homo sapiens; identical to SEQ ID NO: 30965

SEQ ID NO: 30969 - protein, 99 aa, Homo sapiens
AASGFTFSDYWMGWVRQAPGKGLEWVANIRQDGGEKYYVDSVKGRFTISRDNVKNSLSLQMNNLRGEDTAVYYCARDRRPSIYNGLDVWGQGTTVTVSS

SEQ ID NO: 30970 - protein, 99 aa, Homo sapiens
AASGFSFSSYWMSWVRQAPGKGLEWVANIKQDGSEKYYVDSVKGRFTISRDNAKNALYLEMNSLRAEDTAVYYCARDRRPSIYNGLDVWGQGTTVTVSS

SEQ ID NO: 30971 - protein, 99 aa, Homo sapiens
ASGYTFTAHYMHWVRQAPGQGLEWMGCINPNSGGTTYAQKFQGRVTMTTDTSISTAYMELSRLTSDDTAVYYCARPLESSSWKEWFDPWGQGTLVTVSS

SEQ ID NO: 30972 - protein, 99 aa, Homo sapiens
ASGYTFTAHYIHWVRQAPGQGLEWMGCINPNSGGTTYAQKFQGRVTMTTDTSISTAYMELSRLTSDDTAVYYCARPLESSSWKEWFDPWGQGTLVTVSS

SEQ ID NO: 30973 - protein, 99 aa, Homo sapiens
ASGYTFSGHYIHWVRQAPGQGLEWMGCINPNTGATNYAPKFQGRVAMTRDTSISTAYVELSSLNSDDTAVYYCARPLESSSWKEWFDPWGQGTLVTVSS

SEQ ID NO: 30974 - protein, 95 aa, Homo sapiens
GASGFSVSNNYMSWVRQAPGKGLEWVSVIYSGGSTYYADSVKGRFTISRDNSKNTLYLQMNSLRAEDTAVYYCATTGITGTGDYWGQGTLVTVSS

SEQ ID NO: 30975 - protein, 95 aa, Homo sapiens
AASGFTVSSNYMSWVRQAPGKGLEWVSVIYSGGSTYYADSVKGRFTISRDNSKNTLYLQMNSLRVEDTAVYYCATTGITGTGDYWGQGTLVTVSS

SEQ ID NO: 30976 - protein, 95 aa, Homo sapiens
AASGFTVSSNYMSWVRQAPGKGLEWVSVIYSGGSTYYADSVKGRFTISRDNSKNTLYLQMNSLRAEDTAVYYCATTGITGTGDYWGQGTLVTVSS

SEQ ID NO: 30977 - protein, 95 aa, Homo sapiens
AASGFTVTNNYMSWVRQAPGKGLEWVSVIYSGGSTYYADSVKGRFTISRDNSKNTLYLQMNSLRAEDTAVYYCATTGITGTGDYWGQGTLVTVSS

SEQ ID NO: 30978 - protein, 95 aa, Homo sapiens
AASGLIISSYEMNWVRQAPGKGLEWVSYISDSGTTKYYADSVKGRFTIFRDNAKNSLYLQMNSLRAEDTAIYYCARGGGNTLAYWGQGTLVTVSS

SEQ ID NO: 30979 - protein, 95 aa, Homo sapiens
AVSGLTFSSYEMNWVRQAPGKGLEWVSYISSSGSSIYYADSVKGRFTISRDNAKNSLYLQMNSLRAEDTAVYYCARGGGNTLAYWGQGTLVTVSS

SEQ ID NO: 30980 - protein, 95 aa, Homo sapiens
AASGFTFSSYEMNWVRQAPGKGLEWVSYISSSGGSIHYADSVKGRFTISRDNAKNSVYLQMNSLRAEDTAVYYCARGGGNTLAYWGQGTLVTVSS

SEQ ID NO: 30981 - protein, 93 aa, Homo sapiens
AASGFTFSSYEMNWVRQAPGKGLEWVSYIGSGGSTIYYADSVKGRFTISRDNAKNSLCLQMNSLRAEDTAVYYCARGRHLAYWGQGTLVTVSS

SEQ ID NO: 30982 - protein, 93 aa, Homo sapiens
AASGFTFSSHEMNWVRQAPGKGLEWVSNIGGGGNSIYYADSVKGRFTISRDNAKNSLYLQMNSLRAEDTAVYYCARGRHLAYWGQGTLVTVSS

SEQ ID NO: 30983 - protein, 94 aa, Homo sapiens
AASGFTFSSYWMHWVRRVPGKGLVWVSSIRGDANDAAYANSVRGRVTISRDNAKNMLYLQMASLGVEDTAVYYCTREADGFDIWGQGTSVTVSS

SEQ ID NO: 30984 - protein, 94 aa, Homo sapiens
AASGFSLSDHWTHWVRQAPGKGLVWVSSSRYDGEDTAYAGSVRGRFTVSRDNAKNTLYLQMNSLRVDDTAVYYCTREADGFDIWGQGTMVTVSS

SEQ ID NO: 30985 - protein, 92 aa, Homo sapiens
AASGFTFSNYDMSWMRQAPGKGLEWVSVAYVGGSRTSYADSVKGRFTISRDDSKNTVYLQMNSLRVGDSAVYYCTKGSWGDNWGPGTLVTVS

SEQ ID NO: 30986 - protein, 93 aa, Homo sapiens
AASGFTFSSHDMSWVRQAPGKGLDWVSTIYGGESGTSYADSVKGRFIISRDNSKSTLYLQMNSLRAEDTALYYCTKGSWGDNWGQGTLVTVSS

SEQ ID NO: 30987 - protein, 96 aa, Homo sapiens
AASGFTFSSYEWNWVRQAPGKGLEWVSYIDSGGDIIYYADSVKGRFTISRDNAKNSLYLQMNSLGAEDTAIYYCARDERGGGIDYWGQGTLVTVSS

SEQ ID NO: 30988 - protein, 96 aa, Homo sapiens
AASGFIFSSYEMNWVRQAPGKGLEWLSWVSSSGSTIYYADSVKGRFTISRDDAKSSLYLQMNSLRVEDTAVYYCARDERGGGIDYWGQGTLVTVSS

SEQ ID NO: 30989 - protein, 96 aa, Homo sapiens
VSGGSISGNYWSWIRQPPGKGLEWIGYIYYTGTTNYNPSLKSRVTMSVDTSKSQFSLKLTSVTAADTAVYYCARLHYYGSEEFDSWGQGTLVTVSS

SEQ ID NO: 30990 - protein, 97 aa, Homo sapiens
TVSGGSISPYYWSWIRQPPGKGLQYIGYIHYSGGTNYSPSLESRVTISVDTSKNQFSLRLNSVTAADTAVYYCARLHYYGSEEFDSWGQGTLVTVSS

SEQ ID NO: 30991 - protein, 96 aa, Homo sapiens
VSGGSISGYYWSWIRQSPGKGLEWIGYVYYSGSTSYNPSLQSRVTISVDTSTNKFSLKVSSVTAADTAMYYCARLHYYGSEEFDSWGQGTLVTVSS

SEQ ID NO: 30992 - protein, 97 aa, Homo sapiens
TVSDGSISPYYWSWIRQPPGKGLQYIGYIYYNGGTNYSPSLESRVTISVDTSQNQFSLRLSSVTAADTAVYYCARLHYYGSEEFDSWGQGTLVTVSS

SEQ ID NO: 30993 - protein, 98 aa, Homo sapiens
AASGFTFSSYNMNWVRQAPGKGLEWVSSISSSSSYIYYADSVKGRFTISRDNAKNSLYLQMNSLRAEDTAMYYCARDLSGYDPPFGYWGQGTLVTVSS

SEQ ID NO: 30994 - protein, 98 aa, Homo sapiens
AASGFTFSSYNMNWVRQAPGKGLEWVSSISSSSSYIYYADSVKGRFTISRDNAKNSLYLQMNSLRAEDTAVYYCARDLSGYDPPFGYWGQGTLVTVSS

SEQ ID NO: 30995 - protein, 103 aa, Homo sapiens
AASGFTFNNFWVHWVRQAPGKGLVWVARVNHDGTGTSYADSVKGRFTISRDNARNTLYLQMNSLRAEDTALYYCVRDYGYDRSGYWQKYFDYWGQGTPVTVSS

SEQ ID NO: 30996 - protein, 103 aa, Homo sapiens
AASGFSFSSFWVHWVRQAPGKGLVWVARVDHDGTGTSYADSVKGRFTISRDNARNTLYLQMNSLRAEDTALYYCVRDYGYDRSGYWQKYFDYWGQGTPVTVSS

SEQ ID NO: 30997 - protein, 103 aa, Homo sapiens
AASGFTFTTFWMHWVRQAPGEGLMWVSRISNDGRSTNYADSVKGRFTISRDNAKNTVYLQMNGLRAEDTAVYYCVRDYGYDRSGYWQKYFDYWGQGSLVTVSS

SEQ ID NO: 30998 - protein, 94 aa, Homo sapiens
AASGFTFSSYEMNWVRQAPGKGLEWVSCISSGGSIIDYADSVKGRFAISRDNAKNALYLQMNSLRGEDTAVYYCARAPGGMDVWGQGTTVTVSS

SEQ ID NO: 30999 - protein, 94 aa, Homo sapiens
VASGFALSTYEMNWVRQAPGKGLEWVSYITNSGNTMYYADSVKGRFTISRDNAKNSLYLQMNSLGAEDTAVYYCARAPGGMDVWGQGTTVTVSS

SEQ ID NO: 31000 - protein, 95 aa, Homo sapiens
AVSGLTFSNNWMHWVRQTPGKGLVWVSHINSDGSDTTYADSVKGRFTISRDNAKNTLYLQMNNLRVEDTAIYYCTRDNGDPFDYWGQGTLVTVSS

SEQ ID NO: 31001 - protein, 95 aa, Homo sapiens
AASGFSFSNHYMHWVRQAPGKGLEWVSHIDRDGTGTGYADSVKGRFTISRDFAKNTLYLQMNSLRVEDTAVYYCTRDNGDPFDYWGQGTLVTVSS

SEQ ID NO: 31002 - protein, 94 aa, Homo sapiens
AVSGFTFTSHYMHWVRQAPGKGLVWVSHIDFDGSATTYADSVKGRFTISRDNAKNTLYLQMNSLRAEDTAVYYCTRDNGDPFDYWGQGTLVTVS

SEQ ID NO: 31003 - protein, 95 aa, Homo sapiens
VGSRFTFSSYWMNWVRQAPGKGLEWVANIKQDGSETYYADSVKGRFTISRDNAKNSQFLHMNSLRADDTAVYYCVGGYGWLPDSWGQGTLVTVSS

SEQ ID NO: 31004 - protein, 95 aa, Homo sapiens
AGSEFTFSSYWMNWVRQAPGKGLEWVANIKQDGSEEYYVDSVKGRFTISRDNAKNSMYLQMNSLRGEDTAVYYCVGGYGWLPDSWGQGTLVTVSS

SEQ ID NO: 31005 - protein, 97 aa, Homo sapiens
SASGFTFSNYAMHWVRQTPGKRLQYVSAINSGFNTYYADSMKGRFTISRDNSKNTVYLQMSSLRPEDTAVYYCVKDPGPNPRGMDAWGQGTTVTVSS

SEQ ID NO: 31006 - protein, 98 aa, Homo sapiens
SVSGLTFSNYAMHWVRQAPGKGLEYVSGITNTGTNTYYADSLKGRFTTSRDNSKNTLYLQMSSLREDDTAVYYCVKDPGPNPRGMDAWGQGTTVTVSS

SEQ ID NO: 31007 - protein, 98 aa, Homo sapiens; identical to SEQ ID NO: 31006

SEQ ID NO: 31008 - protein, 95 aa, Homo sapiens
AASGFTFSSYWMHWVRQAPGKGLVWVSHINSDGRTIGYADSVKGRFTISRDNAQNTLYLQMNSLRAEDTAVYYCARGYGSGPHYWGQGTLVTVSS

SEQ ID NO: 31009 - protein, 95 aa, Homo sapiens
AASGFTFSSYWMHWVRQAPGKGLVWVSRINTDGSTTIYADSVKGRFTISRDNAKSTLYLQMSSLRAEDTAVYYCARGYGSGPHYWGQGTLVTVSS

SEQ ID NO: 31010 - protein, 99 aa, Homo sapiens
KGSGYTFSDFWIAWVRQKPGKGLEWMGTIYPRDSDVRYGPSFHGQVTISVHRSINTAYLQLNTLKASDTAIYYCARRRGSTDNNWLDPWGQGTLVTVSS

SEQ ID NO: 31011 - protein, 99 aa, Homo sapiens
KGSGYIFDDFWIAWVRQKPGKGLEWMGTIYPRDSDVRYGPSFQGQVTISVHRSISTAYLQLNTLKASDTAIYYCARRRGSTDNNWLDPWGQGTLVTVSS

SEQ ID NO: 31012 - protein, 98 aa, Homo sapiens
ASGYNFPYSWIAWVRQMPGKGLEWMGTIYPGDSHTRYSPSFLGQVTISADRSITTAYLQWTSLQPSDTAVYFCARRRGSTDNNWLDPWGQGTLVTVSS

SEQ ID NO: 31013 - protein, 99 aa, Homo sapiens
AASGFAFSNYALHWVRQSPSRGLEWLAVLSYDGRYQDYADAVRGRFTISRDNSKNILYLQMYSLGTEDTALYYCARDRHSSGWRLFDYWGQGTLVTVSS

SEQ ID NO: 31014 - protein, 99 aa, Homo sapiens
AASGFTFRNYALHWVRQAPGRGLEWLAVLSSDETNRYYADAVKGRFSISRDNSKSMLYLQMDSLRTEDTGLYYCARDRHSSGWRLFDYWGQGTLVTVSS

SEQ ID NO: 31015 - protein, 99 aa, Homo sapiens
AASGFTFSGYAMHWVRQAPGKGLEWVAVMSYDGSNEYYADSVKGRFTISRDNSKNTLYLQMNSLTVEDTAVYYCARDRHSSGWRLFDYWGQGTLVTVSS

SEQ ID NO: 31016 - protein, 95 aa, Homo sapiens
AASGFTFSNSPMNWVRQTPGKGLECVSVIYSSGSTHYLDSVRGRFTISRDNSKNTLYLQMNSLRADDTAVYYCAKDGGGYSFDHWGQGALVTVSS

SEQ ID NO: 31017 - protein, 96 aa, Homo sapiens
AASGFTFSSYAMSWVRQAPGKGLEWVSVIYSGGRSTCFADSVKGRFTISRDDSRNTLYLQMNSLRAEDTAMYFCAKDGGGYSFDHWGQGTLVTVSS

SEQ ID NO: 31018 - protein, 99 aa, Homo sapiens
ASGFSFTSHYMHWVRQAPGQGLEWMGVINPGGFKTHYAQKLQGRVTLTRDTSTSTDYMELSSLSSEDTAFYYCARDISYDDKSWWLDPWGQGTLVTVSS

SEQ ID NO: 31019 - protein, 99 aa, Homo sapiens
ASGFTFSDHYMHWVRQAPGQGLEWMGIINPSGDTTWYEQKFQGRVTMTRDTSTSTVYMELSSLKSEDTAVYFCARDISYDDKSWWLDPWGQGTLVTVSS

SEQ ID NO: 31020 - protein, 95 aa, Homo sapiens
AASGFSFSNYRMHWIRQPPGKGLVWVSDIRGDATIPRYADSVKGRFTISRDNAKNTLYLQMNSLSVEDTAVYFCVRDEPGSFDYWGQGILVTVSS

SEQ ID NO: 31021 - protein, 95 aa, Homo sapiens
AASGFTFSNHRMHWVRHAPGKGLVWVSDILGDGSVPRYADSVKGRFTISRDNAKNTLYLQMNSLRVEDTALYYCVRDEPGSFDYWGQGTLVTVSS

SEQ ID NO: 31022 - protein, 95 aa, Homo sapiens
AASGFTFSNHRMHWVRHAPGKGLVWVSDIFGDGSVPRYADSVKGRFTISRDNAKNTLYLQMNSLRVEDTGLYYCVRDEPGSFDYWGQGTLVTVSS

SEQ ID NO: 31023 - protein, 94 aa, Homo sapiens
TVSGGSTRDYYWTWIRQTPGRGLECIGYIYYTGSTNYNLSLKSRVTISVDTSKNQFSLKLSSVTAADTAVYYCARVTRGYFDYWGQGTLVTVSS

SEQ ID NO: 31024 - protein, 94 aa, Homo sapiens
TVSGASISNYYWTWIRLPPGKGLEWIGDIYYTGNTNFNPSLKSRVAISVDTSQNQFSLSLTSVTAADTAVYYCARVTRGYFDYWGQGTLVTVSS

SEQ ID NO: 31025 - protein, 93 aa, Homo sapiens
AASGFIFRSYWMGWVRQAPGKGLEWVADIKHDGSEGYYLDSVQGRFTISRDNVKNLLYLQMNSLRPEDTAVYYCTRDDYIDSWGQGTLVTVSS

SEQ ID NO: 31026 - protein, 93 aa, Homo sapiens
AASGFTFANYWMAWVRQAPGQGLEWVAHITRDGRAANYVDSVKGRFTISRDNTRNSVDLQMNSLRAEDTAIYYCTRDDYIDSWGQGTLVTVSS

SEQ ID NO: 31027 - protein, 95 aa, Homo sapiens
AASGFIFSDFWMAWVRQAPGRELEWVANINRDGSEQNYVDSVKGRFTISRDNAKNSLYLQMSSLRAEDTGVYYCTTRSRGTLDYWGQGTLASVSS

SEQ ID NO: 31028 - protein, 95 aa, Homo sapiens
VASGLTFNTYWMAWVRQAPGKGLEWVGNINGDGSEQNYVDSVKGRFIISRDNARNSLYLQMSSLRAEDTAVYYCTTRSRGTLDYWGQGTLVHVSS

SEQ ID NO: 31029 - protein, 95 aa, Homo sapiens
AASGFTFSSYWMAWVRQAPGKGLEWVANINRDGSEQNYVDSVKGRFTISRDNAKNSLYLQMSSLRAEDTGVYYCTTRSRGTLDYWGQGTLASVSS

SEQ ID NO: 31030 - protein, 94 aa, Homo sapiens
AASGFIFSNFWMSWVRQSPGKGLEWLANIKEDGSDKNYLGSVRGRFTISRDNAKNSLYLQINNLRADDTAVYYCTTRSRGTLDYWGQGTLVTVS

SEQ ID NO: 31031 - protein, 100 aa, Homo sapiens
TVSGDSIGSSSYYWGWIRQPPGKGLEWIGNIFYTGRAYYNPSLKSRVTISVDTSKNQFSLKLSSVTAADTAVYYCARHLMITFGGLPDYWGQGTLVPVSS

SEQ ID NO: 31032 - protein, 99 aa, Homo sapiens
TVSGDSVTSSYYWGWIRQPPGKGLEWLGNMYYTGTTYYNPSLKSRVTISVDTSKNQFSLKLTSVTAADTAFYYCARHLMITFGGLPDYWGQGTLVTVSS

SEQ ID NO: 31033 - protein, 94 aa, Homo sapiens
AASGFTFSDYWMTWVRQAPEKGLEWVASIKEDGSDKYYVDSVKGRFTISRDNAKSSLYLQMNSLRGEDTAVYYCARYVRAFDYWGQGALITVSS

SEQ ID NO: 31034 - protein, 94 aa, Homo sapiens
AASGFTFSRYWMTWVRQAPGKGLEWVANIKEDGSEKYYVDSVRGRFTISRDNSKSSLYLQMDSLRVEDTAVYYCARYVRAFDYWGRGILVIVSS

SEQ ID NO: 31035 - protein, 96 aa, Homo sapiens
NVSGGSISSYYWSWVRQPPGKGLEWIGYIYYSGSTNYNPSLKSRVTISLDTSKNQFSLKLSSVTAADTAVYYCARHGDGYNPLNYWGQGTLVTVSS

SEQ ID NO: 31036 - protein, 96 aa, Homo sapiens
TVSGGSISSYYWSWIRQPPGKGLEWIGYIYYSGSTNYNPSLKSRVTMSLDTSKNQFSLKLSSVTAADTAVYYCARHGDGYNPLNYWGQGTLVTVSS

SEQ ID NO: 31037 - protein, 94 aa, Homo sapiens
AASGFTFGDYGMSWVRQAPGKGLEWVSGINWNGDNIGDLDSVKGRFTISRDNAKNSLYLQMNSLRVDDTALYYCARGSGAGDYWGQGTLVTVSS

SEQ ID NO: 31038 - protein, 93 aa, Homo sapiens
VASGFNFGDYGMNWVRQAPGKGLEWVSAINWNGDTLGYADSVKGRFTISRDNANNSLYLHMNSLRAEDTAFYYCARGSGAGDYWGQGSLVIVS

SEQ ID NO: 31039 - protein, 99 aa, Homo sapiens
AASGFAFSTYWMHWVRQAPGKGLVWVSRINSDGSSTNYADSVKGRFTISRDNAKNTLYLQMNSLTAEDTAIYYCARASYSSGTYYNDYWGQGTLVTVSS

SEQ ID NO: 31040 - protein, 99 aa, Homo sapiens
VASGFTFSNYWMHWVRQAAGKGLVWVSRIKSDGSVTNTADSVKGRFTTSRDNAKNTLYLQMNSLRAEDTAVYYCARASYSSGTYYNDYWGQGTLVTVSS

SEQ ID NO: 31041 - protein, 99 aa, Homo sapiens; identical to SEQ ID NO: 31040

SEQ ID NO: 31042 - protein, 105 aa, Homo sapiens
TVSGGSISSYYWTWIRQPPGKGLEWIGYIYYSGSTSGSTNYNPSLKSRVTISVDTSKNQFSLKLSSVTAADTAVYYCARGEGEGKYYYYYGMDVWGQGTTVTVSS

SEQ ID NO: 31043 - protein, 103 aa, Homo sapiens
TVSGGSISSYYWSWIRQPPGKGLEWIGYIYYSGSTNYNYNPSLKSRVTISVDTSKNQFSLKLSSVTAADTAVYYCARGEGEGKYYYYYGMDVWGQGTTVTVSS

SEQ ID NO: 31044 - protein, 101 aa, Homo sapiens
SVSGGSISSSYWTWIRQPPGKGLEWIGYIYYSGSTNYNPSLKSRVTISVDTSKNQFSLKLSSVTAADTAVYYCARGEGEGKYYYYYGMDVWGQGTMVTVSS

SEQ ID NO: 31045 - protein, 94 aa, Homo sapiens
SGYTFTNYYMHWVRQAPGQGLEWLGMVISSGGATIYAQKLQGRVTLTRDTSTSTVYMELSSLRSEDTAEYYCVREFRGGTFDYWGQGTLVTVSS

SEQ ID NO: 31046 - protein, 95 aa, Homo sapiens
ASGYSFTSYLIHWVRQAPGQGLEWMGIIGSGDGGTTYAQNLQGRVIMTRDTSTSTVYMELSSLRFEDTAVYYCVREFRGGTFDYWGQGTPVTVSS

SEQ ID NO: 31047 - protein, 91 aa, Homo sapiens
AASGLNFRTYGMSWVRQAPGKGLEWVSTISGSGGNIHYAESVKGRFTISRDNSKNTLSLQMNSLRAEDTALYYCAQNGGYWGRGTLVTVSS

SEQ ID NO: 31048 - protein, 91 aa, Homo sapiens
VASGLTFNRYGMTWVRQAPGKGLEWVSLITGSGGSTYYADSVKGRFTISRDNSKNTLYLQMNSLRTEDTAVYYCAQNGGYWGQGILVIVSS

SEQ ID NO: 31049 - protein, 98 aa, Homo sapiens
ASGYTFSSYYMHWVRQAPGQGLEWMGIINPSGDSTTYAQKFQGRVTMTRHTSTSTVYMELSSLRAEDKAVYYCASGTGDHASIWSMDVWGQGTTVIVS

SEQ ID NO: 31050 - protein, 98 aa, Homo sapiens
ASGYTFSSYYMHWVRQAPGQGLEWMGIINPSGDSTTYAQKFQGRVTMTRHTSTSTVYMELSSLRAEDTAVYYCASGTGDHASIWSMDVWGQGTTVIVS

SEQ ID NO: 31051 - protein, 96 aa, Homo sapiens
AASGFTFSDYYMDWVRQAPGKGLEWVGRSRSSARSYTTEYAASVKGRFTISRDASKNSLYLQMNGLRTEDTAIYYCVRGFRGLDVWGQGTRVTVSS

SEQ ID NO: 31052 - protein, 95 aa, Homo sapiens
ASGFTLSDRYMDWVRQAPGKGLEWVGRSRNKANSYTTEYAASVQGRFTISRDDSKNSLSLQMNSLKSEDTAIYYCVRGFRGLDVWGQGTTVTVSS

SEQ ID NO: 31053 - protein, 90 aa, Homo sapiens
AASGFTFRSYWMSWVRQAPGKGLEWVASIKEDGSEKYYVDSVKGRFTISRDNAKNSLNLQMNSLRAEDTAVYYCARGYLWGQGTLVTVSS

SEQ ID NO: 31054 - protein, 90 aa, Homo sapiens
AASGFTFTTSWMSWVRQPPGKGLEWVANIKEDGSERYYVDSVKGRFTISSDNAKNSLYLQMNSLRAEDTAVYFCARGYLWGQGTLVTVSS

SEQ ID NO: 31055 - protein, 98 aa, Homo sapiens
ASGYTFTDYDISWVRQATGQGLEWMGWINANSGSTDYLQRFQGRVTMTRDTSKTTAYMELSSLTFEDTAVYYCARGGVPGQQLPRDYWGQGTLVTVSS

SEQ ID NO: 31056 - protein, 98 aa, Homo sapiens
ASGFTFTNYDINWVRQATGQGLEWMGWVNSNSGNTGYAQKFQGRVTMTRDTSTSTAYMELSRLRSEDTAVYYCARGGVPGQQLPRDYWGQGTLVTVSS

SEQ ID NO: 31057 - protein, 98 aa, Homo sapiens
ASGYSFTNYDISWVRQATGQGLEWLGWVNCDSGNTGYAPKFRDRVTMTRDASITTVYMDLSGLKSEDTAVYYCARGGVPGQQLPRDYWGQGTLVTVSS

SEQ ID NO: 31058 - protein, 98 aa, Homo sapiens
ASGYSFTDYDISWVRQATGQGLEWLGWVNCNSGNTGYAQKFQGRVTMTRDTSITTAYMELSGLRSEDTAVYFCARGGVPGQQLPRDYWGQGTLVTVSS

SEQ ID NO: 31059 - protein, 98 aa, Homo sapiens
ASGFTFTNYDINWVRQATGQGLEWMGWVNSNSGNTGYAQKFQGRVTMTRDTSTSTAYMELSRLRSEDTAVYYCARGGVPGQQLPRDYRGQGTLVTVSS

SEQ ID NO: 31060 - protein, 98 aa, Homo sapiens; identical to SEQ ID NO: 31056

SEQ ID NO: 31061 - protein, 98 aa, Homo sapiens
ASGYSFTNYDINWVRRATGQGLEWIGWVNASSGKTDYAQKFRGRVTVTRDTSINTAYMELHSLASDDTAVYYCARGGVPGQQLPRDYWGQGTLVTVSS

SEQ ID NO: 31062 - protein, 98 aa, Homo sapiens
TLSGGSISSAGYYWTWIRLYSGRGLEWIGNIDYSGATRYNPSLKSRLTVSVDTSKNQFSLNLRSVSAADTAVYYCARGTRWSWYFDLWGRGALVTVSS

SEQ ID NO: 31063 - protein, 98 aa, Homo sapiens
TVSGGSISRDGYYWSWIRQHPGKGLEYIGYISYTGNTDYNPSLRSRLTMSIDTSKNQFSLKLTSVTAADAAVYYCARGTRWSWYFDLWGRGTLVTVSS

SEQ ID NO: 31064 - protein, 98 aa, Homo sapiens
TVSGGSISRDGYYWSWIRQHPGKGLEYIGYISYTGNTDYNPSLRSRLTMSIDTSKNQFSLKLTSVTAADAAVYYCARGTRWSWYFDLWDRGTLVTVSS

SEQ ID NO: 31065 - protein, 93 aa, Homo sapiens
AASGFTFSSYWMTWVRQAPGKGLEWVANIKQDGSEQYYVDSVKGRFTISRDNAKNSLYLQMNSLRAEDTAVYYCARGYSGSHWGQGSLVTVSS

SEQ ID NO: 31066 - protein, 93 aa, Homo sapiens
AVSGFTVNTYWMNWVRQAPGKGLEWVANIKQDGSEKNYVDSVKGRFTISRDNAKNSLYLQMNSLRAEDTAYYYCARGYSGSHWGQGTLVTVSS

SEQ ID NO: 31067 - protein, 99 aa, Homo sapiens
GASGFIFSQYEFQWVRQPPGKGLEWISYITSSGSDILYADSVKGRFTMSRDNAKNSLYLQMNNLRAEDTAVYYCARERENCGGDCLDYWGQGTLVTVSS

SEQ ID NO: 31068 - protein, 99 aa, Homo sapiens
AASGFTFSDYEMTWVRQAPGKGLEWLSYITPSGGAINYADSVKGRFTVSRDNSKNSLYLHMNSLRAEDTALYYCARERENCGGDCLDYWGQGTLVTVSS

SEQ ID NO: 31069 - protein, 98 aa, Homo sapiens
APSGFIFNTYGMHWVRQAPGKGLEGVAVISGDGSSTFYRDSVEGRFTISRDNAKNTLYLQMNSLRVEDTAVYYCVRDGGGGYNQIDYWGQGTLVTVSS

SEQ ID NO: 31070 - protein, 98 aa, Homo sapiens
AASGFTFSSYGMQWVRLVPGKGLECVGVIGHDGNSEYYAGSVKGRFSISRDNFKNMLYLQMDGLRAEDTAIYYCVRDGGGGYNQIDYWGQGILVTVSS

SEQ ID NO: 31071 - protein, 98 aa, Homo sapiens
AASGFTFRSYAMHWVRLVPGKGLESVGVVGRDENEKYYAGSVKGRFTISRDNFENILYLQMDGLRAEDTATYFCVRDGGGGYNQIDYWGQGIVVTVSS

SEQ ID NO: 31072 - protein, 98 aa, Homo sapiens
AASGFTFGDYGMSWVRQPPGKGLEWVSGINWNGRSTGYADSVKGRFTISRDNGKNTLYLQMNSLSAEDTALYYCARGNYHGSGSLDYWGQGTLVTVSS

SEQ ID NO: 31073 - protein, 98 aa, Homo sapiens
AASGFTFGDYGMSWVRQAPGKGLEWVSGINWNGRSRGYADSVQGRFTVSRDNAKNSLYLQMNSLRDEDTAFYYCARGNYHGSGSLDYWGQGTLVTVSS

SEQ ID NO: 31074 - protein, 90 aa, Homo sapiens
TVSGYSISSGYYWGWIRQPPGKGLEWIGSVHHSGSTYYNPSLKSRVTISMDTSKNQFSLKLSSVTAADTAVYYCARDVHWGQGTLVTVSS

SEQ ID NO: 31075 - protein, 90 aa, Homo sapiens
TVSDYSISSNFHWGWVRQPPGKGLEWIGVLYQTELTSYNPSLRSRVTISLDSSQNQFSLKLTSVTAADTAVYYCARDVHWGQGTLVTVSS

SEQ ID NO: 31076 - protein, 90 aa, Homo sapiens
TVSDYSISSNFHWGWVQQPPGKGLEWIGVLYQTELTSYNPSLRSRVTISLDSSQNQFSLKLTSVTAADTAVYYCARDVHWGQGTLVTVSS

SEQ ID NO: 31077 - protein, 91 aa, Homo sapiens
SGYTFSTYVISWVRQAPGQGLEWMGWINPNNGNTKYAQNLQGRVTMTTDTSTSTAYMELRSLESDDTAVYYCARRSFLDVWGQGTTVTVSS

SEQ ID NO: 31078 - protein, 92 aa, Homo sapiens
ASGYSFTSFGISWVRQAPGQGLEWMGWINPNNGRITYAQTLQGRVTMTTDTSTSTAYMELRSLRSDDTAVYYCARRSFLDVWGQGTTVTVSS

SEQ ID NO: 31079 - protein, 99 aa, Homo sapiens
SGYTFINYDINWVRQASGQGLEWMGWMNPKSGNTGYAQKFQGRVTMTRDTSTGTAYMELSNLRLDDTAVYYCARPPETSGWYRNCFDPWGQGTLVTVSS

SEQ ID NO: 31080 - protein, 100 aa, Homo sapiens
ASGYTFINYDINWVRQAPGQGLEWLGWMNPKTGNTGYAEKFQGRITMTRNTAISTAYMELSSLTAEDTAMYYCARPPETSGWYRNCFDPWGQGTLVTVSS

SEQ ID NO: 31081 - protein, 100 aa, Homo sapiens
ASGYTFINYDVNWVRQAPGQGLEWLGWMNPKTGNTGYAEKFQGRITMTRNTAISTAYMELSSLTAEDTAMYYCARPPETSGWYRNCFDPWGQGTLVTVSS

SEQ ID NO: 31082 - protein, 100 aa, Homo sapiens; identical to SEQ ID NO: 31080

SEQ ID NO: 31083 - protein, 91 aa, Homo sapiens
EVSGSTFSSYWMHWVRQAPGKGLVWVSHINNDGSGTTYADSVKGRFTISRDNAKNTLYLQMNSLRAEDTAVYYCLRSFDTWGQGTLVTVSS

SEQ ID NO: 31084 - protein, 91 aa, Homo sapiens
AASGFTFSTYSMTWVRQVPGKGLAWVSRITADGRTTNYADSVKGRFTISRDNAKNTLYLQMNSLRVEDTAVYYCLRSFDTWGQGTLVTVSS

SEQ ID NO: 31085 - protein, 91 aa, Homo sapiens
EVSGSTFSSHWMHWVRQAPGKGLVWVSHINNDGSGTTYADSVKGRFTISRDNAKNTLYLQMNSLRAEDTAVYYCLRSFDTWGQGTLVTVSS

SEQ ID NO: 31086 - protein, 99 aa, Homo sapiens
ASGYTYTSYGIIWVRQAPGQGLEWMGWIGPNNVKTRYAQNVQGRVTLTTDTATSTAYMEVRSLRSDDTAVYYCARGSVELRDYYYMDVWGTGTTVTVSS

SEQ ID NO: 31087 - protein, 99 aa, Homo sapiens
ASGYTFSSYGIIWVRQAPGQGLEWMGWIGRNNVNTRYAQNLQGRVTMTTDTATSTAYMEVTSLRSDDTAVYYCARGSVELRDYYYMDVWGTGTTVTVSS

SEQ ID NO: 31088 - protein, 99 aa, Homo sapiens
ASGYNFVRYGINWVRQAPGQGLEWLGWNSPYNGQTNYAQKVQGRVTMTTDTSTTTAYMDLRSLGSDDTAVYYCARGSVELRDYYYMDVWGKGTTVTVSS

SEQ ID NO: 31089 - protein, 99 aa, Homo sapiens
ASGYTFINYGIIWVRQAPGQGLEWMGWIGAYKSNTKYAQKLQGRVTMTTDTSTSTVYMELRSLTSDDTAVYYCARGSVELRDYYYMDVWGKGTTVTVSS

SEQ ID NO: 31090 - protein, 99 aa, Homo sapiens
ASGYNFIRYGINWVRQAPGQGLEWLGWNSPSNGKTNYAQKLQGRVTMTTDTSTSTAYMDLGSLGSDDTAVYYCARGSVELRDYYYMDVWGKGTTVTVSS

SEQ ID NO: 31091 - protein, 92 aa, Homo sapiens
AASGFTVSSTYMTWVRQAPGKGLEWVSILYSGGSSYYADSVKGRFTISRDSSKNTVHLQMNSLRVEDTAVYYCARERGPNLWGQGTLVIVSS

SEQ ID NO: 31092 - protein, 92 aa, Homo sapiens; identical to SEQ ID NO: 31091

SEQ ID NO: 31093 - protein, 92 aa, Homo sapiens
AASGFTVSSIYMSWVRQTPGKGLEWVSLTHSDGTTYYADSVKDRFTVSRDSSQNTLYLEMNSLRAEDTAVYYCARERGPNLWGQGTLVTVSS

SEQ ID NO: 31094 - protein, 92 aa, Homo sapiens; identical to SEQ ID NO: 31091

SEQ ID NO: 31095 - protein, 92 aa, Homo sapiens; identical to SEQ ID NO: 31091

SEQ ID NO: 31096 - protein, 94 aa, Homo sapiens
AASGFTFSNSWMTWVRQAPGTGLEWVASINQEGSERYYMDSVKGRFSISRDNPKNSLYLQMNSLRAEDTAVYFCAKGHTILDPRGPGTLATVSS

SEQ ID NO: 31097 - protein, 94 aa, Homo sapiens
AASGFSFSNFWMTWVRQAPGKGLEWVANIKLDGSEKYYVDSVKGRFTISRDNAKNSLYLQMNSLRAEDTAVYYCAKGHTILDPQGQGTLVTVSS

SEQ ID NO: 31098 - protein, 94 aa, Homo sapiens; identical to SEQ ID NO: 31097

SEQ ID NO: 31099 - protein, 94 aa, Homo sapiens
AASGFSFSNFWMTWVRQAPGKGLEWVANIKFDGSEKYYVDSVKGRFAISRDNAKNSLYLQMNSLRAEDTAVYYCAKGHTILDPQGQGTLVTVSS

SEQ ID NO: 31100 - protein, 100 aa, Homo sapiens
TVSGSSVTGTLYSWGWIRQPPGKGLEWIGSIHHSGTTYFNPSLSSRLSISVDTSKNQLSLNLSSVTAADTAVYYCARDRRGYSGYDLDYWGQGTLVTVSS

SEQ ID NO: 31101 - protein, 100 aa, Homo sapiens
TVSGGSISSNSYYWGWIRQPPGKGLEWIGSIYYSGSTYYNPSLKSRVTISVDTSKNQFSLKLSSVTAADTAVYYCARDRRGYSGYDLDYWGQGTLVTVSS

SEQ ID NO: 31102 - protein, 96 aa, Homo sapiens
AASGFTFSSYAMHWVRQAPGKGLEWVAVISYDGSNKYYADSVKGRFTISRDNSKNTLYLQMNSLRAEDTAVYYCATGYSYGNFDYWGQGTLVTVSS

SEQ ID NO: 31103 - protein, 96 aa, Homo sapiens
AASGFIFSTYGMHWVRQAPGRGLEWVAFIYYDGSNKFSADSVKGRFTISRDNSMDTLYLQVNSLRAEDTAVYYCATGYSYGNFDYWGQGTLVTVSS

SEQ ID NO: 31104 - protein, 94 aa, Homo sapiens
AASGFPFSSYGMSWVRQAPGKGLEWVSTISGSAGNTYYADSVKGRFTISRDNSKNTLYLQMNSLRDEDTAVYYCAKNSGSYDYWGQGTLVTVSS

SEQ ID NO: 31105 - protein, 94 aa, Homo sapiens
AASGFTFSPYGMTWVRQAPGKGLEWVSVISGSGDSIYYADSVKGRFTISRDNSKNTLYLQMNSLRAEDTAVYYCAKNSGSYDYWGQGTLVTVSS

SEQ ID NO: 31106 - protein, 92 aa, Homo sapiens
TVSGDSISSSTYHWGWIRQPPGKGLEWLGTIYFSGTTHYNPSLESRVTISVDTSKNQFSLQLTSVTAADTAVYYCARGTSPWSQGTLVTVSS

SEQ ID NO: 31107 - protein, 92 aa, Homo sapiens
TVSGDSISDSVYYWAWIRQPPGKGLEWIGSIHYSGSTSYNPSLKSRVAIFVDTSKNQFSLKLTSVTAADTAVYYCARGTSPWGQGTLVTVSS

SEQ ID NO: 31108 - protein, 96 aa, Homo sapiens
AASGFTFSAYAMNWVRQAPGEGLEWVSSIIDGGGDTFYTDSVKGRFTISRDNSQNTLYLQMNSLRAEDTAVYFCAKVHGGYYFDLWGRGTLVTVSS

SEQ ID NO: 31109 - protein, 96 aa, Homo sapiens
AASGFTFSGYAMNWVRQAPGEGLEWVSSIIDGGGDTFYRDSVKGRFTISRDNAQNTLYLQMNSLRAEDTAVYFCAKVHGGYYFDLWGRGTLVTVSS

SEQ ID NO: 31110 - protein, 96 aa, Homo sapiens
AASGFTFSRYAMNWVRQAPGEGLEWVSSIIDGGGDSFYTDSVKGRFTISRDNSQNTLYLQMNSLRAEDTAVYFCAKVHGGYYFDLWGRGTLVTVSS

SEQ ID NO: 31111 - protein, 96 aa, Homo sapiens
AASGFTFSNYAVNWVRQAPGRGLEWVSSIIDSGGSTYYTDSVKGRFTISRDNSKNTLYLQMNSLRAEDTAVYYCAKVHGGYYFDLWGRGTLVTVSS

SEQ ID NO: 31112 - protein, 96 aa, Homo sapiens; identical to SEQ ID NO: 31111

SEQ ID NO: 31113 - protein, 101 aa, Homo sapiens
AASGFTFSGSAMHWVRQASGKGLEWVGRIRSKANSYATGYAASVKGRFTISRDDSKNTAYLQMNSLKTEDTAVYYCIRHHYDSSGYYYGYWGQGTLVTVSS

SEQ ID NO: 31114 - protein, 101 aa, Homo sapiens
AASGFTFSGSAMHWVRQASGKGLEWVGRIRSKANNYATAYAASVKGRFTISRDDSKNTAYLQMNSLKTEDTAVYYCIRHHYDSSGYYYGYWGQGTLVTVSS

SEQ ID NO: 31115 - protein, 101 aa, Homo sapiens
AASGFTFSGSAMHWVRQASGKGLEWVGRIRSKANNYATEYAASVKGRFTISRDDSKNTAYLQMNSLKTEDTAVYYCIRHHYDSSGYYYGYWGQGTLVTVSS

SEQ ID NO: 31116 - protein, 101 aa, Homo sapiens; identical to SEQ ID NO: 31115

SEQ ID NO: 31117 - protein, 94 aa, Homo sapiens
AASGFTFSSYWIHWVRQAPGKGLVWVSRTNTDGSSTSYADSVKGRFTISRDNAKNTLYLQMNSLRAEDTAVYYCARGGSYFDSWGQGTLVTVSS

SEQ ID NO: 31118 - protein, 94 aa, Homo sapiens
AASGFNFSNYWMHWVRQAPAKGLIWVARIKGDGSTTTYADSVKGRFTISRDNSRNTLYLHVNSLRAEDTAVYFCARGGSYFDSWGQGTLVTVSS

SEQ ID NO: 31119 - protein, 99 aa, Homo sapiens
TVSGYSISNYCHWGWLRQPPGKGLEWIGSIYHSGSTYYNPSLMSRVTISVDTSKNQFSLKLSSVTAADTAMYYCARRIAVAGHWYFDLWGRGTLVTVSS

SEQ ID NO: 31120 - protein, 99 aa, Homo sapiens
TVSGYSISSGYYWGWIRQPPGQGLEWIGNIHHSGNTYYNPSLQSRVTISVDTSKNQFSLNLSSVTAADTAVYYCARRIAVAGHWYFDLWGRGTLVTVSS

SEQ ID NO: 31121 - protein, 98 aa, Homo sapiens
AASGFTFSTYEYNWVRQAPGKGLEWVSYINTISAIFYADSVRGRFTMSRDNAKNSLYLQMNSLTAEDTAVYYCAREIPDCGGDCLDYWGQGTLVAVSS

SEQ ID NO: 31122 - protein, 98 aa, Homo sapiens
AASGFIFSTYEYNWVRQAPGKGLEWVSYINTVSAIFYADSVKGRFTMSRDNAKNSLYLQMNSLTAEDTAVYYCAREIPDCGGDCLDYWGQGTLVTVSS

SEQ ID NO: 31123 - protein, 98 aa, Homo sapiens
VTSGFTFSAYEFNWVRQAPGEGLEWVSYISSNGIYIHYADSVRGRFTMSRDNARNSLYLQMNNLRADDTAVYFCAREIPDCGGDCLDYWGQGTLVTVS

SEQ ID NO: 31124 - protein, 98 aa, Homo sapiens
AASGFTFSTYEYNWVRQAPGKGLEWVSYINTVSAIFYADSVKGRFTMSRDNAKNSLYLQMNSLTADDTAVYYCAREIPDCGGDCLDYWGQGTLVTVSS

SEQ ID NO: 31125 - protein, 93 aa, Homo sapiens
TVSGVSISNYYWSWIRQPPGKGLEWIGYIFYSGSTNYNPSLKSRVTISIDTSRRQFSLNLNSVTAADTAVYYCARGNGYHLFWGQGTLVTVSS

SEQ ID NO: 31126 - protein, 93 aa, Homo sapiens
TVSGVSMSPYYWCWIRQPPGKGLEWIGYIYYSGNTNYNPSLKSRVTISVDTSKSQFSLKLSSVTAADTAVYYCARGNGYHLFWGQGSLVTVSS

SEQ ID NO: 31127 - protein, 93 aa, Homo sapiens; identical to SEQ ID NO: 31126

SEQ ID NO: 31128 - protein, 93 aa, Homo sapiens
TVSGGSISTYYWSWIRQPPGKGLEWIGYIYYSGSTNYNPSLKSRVTVSVDTSKNQFSLKLSSVTAADTAVYYCARGNGYIRYWGQGTLVTVSS

SEQ ID NO: 31129 - protein, 93 aa, Homo sapiens
TVSGGSISGYCWGWIRQPPGKGLEWIGYICYTGSTNYNPSLKSRVALSIDTSKNQFSLKLSSVTAADTAVYLCARGNGYIRYWGQGTLVTVSS

SEQ ID NO: 31130 - protein, 95 aa, Homo sapiens
ASGYIFTTYFLHWVRQAPGQGLEWVGIINPSGGGTNYPQKFQGRVTMTRDTSTSTVYMELSSLGSEDTAVYYCVREWSGGHFDYWGQGTLVTVSS

SEQ ID NO: 31131 - protein, 95 aa, Homo sapiens
ASGYTFTSYYIHWMRQAPGQGLQWLGIIIPSVGRTNYAQKFQGRVSMTADTSTSTVYLELRSLGSDDTALYFCVREWSGGHFDYLGQGTPVTVSS

SEQ ID NO: 31132 - protein, 95 aa, Homo sapiens; identical to SEQ ID NO: 31131

SEQ ID NO: 31133 - protein, 98 aa, Homo sapiens
AVYGGSFSRHFWSWIRQPPGKGLEWIGEINHGGSANSSPSLKSRVTISLDTSKNQLSLRLSSVTAADTAVYYCARAGTWGPYDAFDIWGQGTMVTVSS

SEQ ID NO: 31134 - protein, 101 aa, Homo sapiens
AVYDDSFKTLYWSWIRQPPGKGLEWIGEIHHSGFTNYNPSLPSLRSRVTILLDTSNYQISLKLTSVTAADTAMYYCARAGTWGPYDAFDIWGQGTMVTVSS

SEQ ID NO: 31135 - protein, 95 aa, Homo sapiens
AASGFTLSDHNMDWVRQAPGKGLEWVGRREKANSYTIEYAASVRGRFTISRDDSKNSLYLQMNSLKTEDTAVYYCTRGLNSFDIWGQGTMVTVSS

SEQ ID NO: 31136 - protein, 96 aa, Homo sapiens
AASGFTFSDYHMDWVRQAPGKGLEWVGRATTKGRSSTAEYAASVKGRFTISRDDSKNSLYLEINSLRSEDTAVYFCTRGLNSFDIWGQGTVVSVSS

SEQ ID NO: 31137 - protein, 95 aa, Homo sapiens
AASGFTLSDHNMDWVRQAPGKGLEWVGRREKANSYTIAYAASVRGRFTISRDDSKNSLYLQMNSLKTEDTAVYYCTRGLNSFDIWGQGTMVTVSS

SEQ ID NO: 31138 - protein, 95 aa, Homo sapiens; identical to SEQ ID NO: 31135

SEQ ID NO: 31139 - protein, 97 aa, Homo sapiens
ISGDSVSSNRVAWNWIRQSPSRGPEWLGRTYYRSKWYNDYAVSVKSRITINPDTSKNQFSLQLNSVTPEDTAVYYCARGYNYAFDFWGQGTLVTVSS

SEQ ID NO: 31140 - protein, 97 aa, Homo sapiens
ISGDSVSTKSVGWHWIRQSPSRGLEWLGRTYYRSKWSNDYALSVKSRITINPDTSKNQFSLQLNSVTPEDTAVYYCARGYNYAFDFWGQGTLVTVSS

SEQ ID NO: 31141 - protein, 95 aa, Homo sapiens
AASGFTFSSHWMNWVRQAPGKGLEWVAIIKQDGSEKKYVDSVKGRFTISRDNAKNSLYLQIDSLRAEDTAVYYCVSGLGWLPDYWGQGTLVTVSS

SEQ ID NO: 31142 - protein, 95 aa, Homo sapiens; identical to SEQ ID NO: 31141

SEQ ID NO: 31143 - protein, 95 aa, Homo sapiens
AASGFTFSNYWMNWVRQAPGKGLEWVAIIQQDGSEKYYVDSVKGRFTISRDNAKNSLYLQMNSLRADDTAVYYCVSGLGWLPDYWGQGTLVTVSS

SEQ ID NO: 31144 - protein, 93 aa, Homo sapiens
AASGFTFRNYWMSWVRQAPGKGLEWVANIKEDGSEKYYVDSVKGRFSISRDNADNSLYLQMNSLRVEDTAVYFCTRDTRFYYWGQGTLVAVSS

SEQ ID NO: 31145 - protein, 93 aa, Homo sapiens
AASGFSFSNYWMTWVRQTPGRGLQWVASMTADGAQKYYEASVKGRFTISRDNVDNSLFLQMTSLRVEDTALYYCTRDTRFYYWGQGALVTVSS

SEQ ID NO: 31146 - protein, 105 aa, Homo sapiens
TQTLTLTCTFSGFSLSTSGMCVSWIRQPPGKALEWLARIDWDDAKHYSTSLRTRLTISKDTSKNQVVLTMTDMDPVDTGTYFCAREVPTTASDFWGQGALVTVSS

SEQ ID NO: 31147 - protein, 105 aa, Homo sapiens
TQTLTLTCSLSGFSLSTRGMSVSWIRQAPGKALEWLARIDWDDDKYYSTSLRTRLTISKDTSKNQVVLTMTNMDPVDTGTYYCAREVPTTASDFWGQGTPVTVSS

SEQ ID NO: 31148 - protein, 95 aa, Homo sapiens
VSGGSVNSDSYYWSWIRQPPGAGLEWIGYMFYSGNTNYNPSLKSRVTITIDTSKNQFSLKLRSVTAADTAVYYCARDRGDYFDYWGQGTLVTVSS

SEQ ID NO: 31149 - protein, 96 aa, Homo sapiens
TVSGGSISSGSYYWSWIRQPAGKGLEWIGRIFTSGSTSYNPSLKSRVTISVDRSKNQFSLKLNSVTAADTAVYYCARDRGDYFDYWGQGTLVTVSS

SEQ ID NO: 31150 - protein, 96 aa, Homo sapiens
TVSGGSVNSDSYYWTWIRQSPGAGLEWIGYMFYSGNTNYNPSLKSRVTITIDTSKNQFSLKLRSVTAADTAVYYCARDRGDYFDYWGQGTLVTVSS

SEQ ID NO: 31151 - protein, 91 aa, Homo sapiens
AASGITFSNFWMTWVRQAPGKGLEWVATIKQDGSEKYYVDSVKGRFTISRDNAKNSLYLQMNNLRDEDTAVYYCATARDYWGQGTLVIVSS

SEQ ID NO: 31152 - protein, 91 aa, Homo sapiens; identical to SEQ ID NO: 31151

SEQ ID NO: 31153 - protein, 91 aa, Homo sapiens
AASGLTFSSYWMTWVRQAPGKGLEWVANIKQDGSEKYYADSVKGRFTISRDNAKSSLYLQMNSLRVEDTAVYYCATARDYWGQGTLVTVSS

SEQ ID NO: 31154 - protein, 92 aa, Homo sapiens
TVSGGSISSSSYYWGWFRQPPGKGLEWIGSISCSGSTYYNPSLKSRVTISVDTSKNQFSLKLSSVTAADTAVYYCARHPDSWGQGTLVTVSS

SEQ ID NO: 31155 - protein, 92 aa, Homo sapiens
TVSGGSINSSTSYWGWIRQPPGKGLEWIGNIYYSGSTDYNPSLKSRVTISVDTSKNQFSLKLSSVIVADTAVYYCARHPDSWGQGTLVTVSS

SEQ ID NO: 31156 - protein, 100 aa, Homo sapiens
AASGFTFSDRYMDWVRQAPGRGLEWVGRSRDKSGSYTTEYAASVRGRFTISRDDAKNSVYLQMNSLKTEDTAVYYCARGDSSGWANAFDIWGQGTVVTVS

SEQ ID NO: 31157 - protein, 101 aa, Homo sapiens
AASGFTFSDHYMDWVRQAPGEGLEWVGRSRDKPHGYTAEYAASVKGRFTISRDESKNSIYLQMNSLQTDDTAVYYCARGDSSGWANAFDIWGQGTMVTVSS

SEQ ID NO: 31158 - protein, 101 aa, Homo sapiens
AASGFTFSDHYMDWVRQAPGKGLEWVGRSRDKPHGYTAEYAASVKGRFTISRDESKNSVYLQMNSLQTDDTAVYYCARGDSSGWANAFDIWGQGTMVTVSS

SEQ ID NO: 31159 - protein, 95 aa, Homo sapiens
AASGFTFRSSAMSWVRQAPGKGLEWVSSISGSGAGTYYADSVKGRLTISRDNSKNTAYLQMNSLRVEDTALYYCAKLVPDYFDYWGQGILVTVSS

SEQ ID NO: 31160 - protein, 95 aa, Homo sapiens
VASGFTFRSSAMSWVRQAPGKGLEWVSSISASGGGTYYADSVKGRFTISRDNSKNTLYLQMSSLRAEDTALYYCAKLVPDYFDYWGQGTLVTVSS

SEQ ID NO: 31161 - protein, 98 aa, Homo sapiens
TVSGYSITSGYYWGWIRQPPGKGLEWIGSIYHGGSAYYSPSLKSRVTISLDTSKNQFSLKLRSVTAADTAVFYCARVGSGARTWFDPWGQGTLVTVSS

SEQ ID NO: 31162 - protein, 98 aa, Homo sapiens; identical to SEQ ID NO: 31161

SEQ ID NO: 31163 - protein, 98 aa, Homo sapiens
TVSSYSISSGYYWGWIRQSPGKGLEWIGSVYYSGTTYYNPSLKSRVTISVDTSQNQFSLKLRSVTAADTAMYYCARVGSGARTWFDPWGQGTLVTVSS

SEQ ID NO: 31164 - protein, 94 aa, Homo sapiens
AASGFIFSSSWMSWVRQAPGKGLEWVANIKEDGSDKYYVDSVKGRFTISRDNAKASLYLQMNALRAEDTAVYYCAKDGRTWPFWGQGTLVTVSS

SEQ ID NO: 31165 - protein, 94 aa, Homo sapiens
AASGFTFSNSWMSWVRQAPGKGLEWVANIKQDGSEKFYVDSVKGRFSISRDNAKNSLYLQMNSLRAEDTAVYYCAKDGRTWPFWGQGTLVTVSS

SEQ ID NO: 31166 - protein, 100 aa, Homo sapiens
AASGLPFSNYDMHWVRQVPGKGLEWVSAIGTRYDTYYSTSVKGRFTISRENAKTSLYLQMNSLSVGDTAVYYCAREVMDSISRGWYFDLWGRGTLVTVSS

SEQ ID NO: 31167 - protein, 100 aa, Homo sapiens
AASGFTFSTYDMHWVRQAVGKGLEWVSGIGTIGDTYYPGSVKGRFTISRENAKDSLYLQMNSLRAGDTAVYFCAREVMDSISRGWYFDLWGRGTLVTVSS

SEQ ID NO: 31168 - protein, 93 aa, Homo sapiens
AASGFTFSNYWMTWVRQAPGKGLECVANIKQDGSEKYYVDSVKGRFTISRDNAKNSLYLQMNSLRAEDTAVYYCARGRGVDGWGQGTTVTVSS

SEQ ID NO: 31169 - protein, 93 aa, Homo sapiens
AASGFTFTNNWMTWVRQAPGKGLEWVACIKQDGSEKYYVDSVKGRFTISRDNAKNSVYLQMNSLRAEDTAVYYCARGRGVDGWGQGTTVTVSS

SEQ ID NO: 31170 - protein, 102 aa, Homo sapiens
TVSGGSISSSSYYWGWIRQPPGKGLEWIGSIYYSGSTYYNPSLKSRVTISVDTSKNQFSLKLSSVTAADTAVYYCAKETYYYDSSGYPFDYWGQGTLVTVSS

SEQ ID NO: 31171 - protein, 102 aa, Homo sapiens; identical to SEQ ID NO: 31170

SEQ ID NO: 31172 - protein, 96 aa, Homo sapiens
TVSGSSISTYYWSWIRQPPGKGLEWIGYFYNSGSTDYNPSLKSRVTMSVDTSKNQFSLKLRSVTGADTAVYFCARYGRGWPDLDYWGQGTLVTVSS

SEQ ID NO: 31173 - protein, 96 aa, Homo sapiens
TVSGVSISTYYWSWIRQPPGRGLEWIGYIYSSGSINYNPSLKSRVTISVDTSKNQISLKLTSVTAADTAVYYCARYGRGWPDLDYWGQGTLVTVSS

SEQ ID NO: 31174 - protein, 98 aa, Homo sapiens
TVSGGSISSSSYFWGWIRQPPGKGLEWIGTMSYSGRSYYNPSLKSRVTISVGTSKNQFSLKMNSVTAADTAVYYCERERSGYSYVDYWGQGTLVSVSS

SEQ ID NO: 31175 - protein, 98 aa, Homo sapiens
TVSGGSISSSSYYWGWVRQPPGRGLEWIGIIYYSGRTYYNPSLKSRVTISLDTSKNQFSLKLSSVTDADTAVYYCERERSGYSYVDYWGQGTLVTVSS

SEQ ID NO: 31176 - protein, 96 aa, Homo sapiens
EVSGITFSMSGMHWVRQAPGKGLEWVAMIWSDGSQKYYADSVKGRFTISRDNSKNTVHLQMDSLRAEDTAAYYCARDKGVASLDYWGQGTLVTVSS

SEQ ID NO: 31177 - protein, 96 aa, Homo sapiens
AASGIIFSRSGMHWVRQAPGKGLEWVGMIWSDGSSKYYADSVKGRFTITRDNSKNTLDLQMDSLRAEDTAIYYCARDKGVASLDYWGQGTLVTVSS

SEQ ID NO: 31178 - protein, 95 aa, Homo sapiens
ALGYTLTSYYTHWVRQAPGQGLEWMGVINPIDDSTSYAQKFHGRVTMTSDTSTSTVYMELSSLTSEDTAVYYCARGHSSGHFDYWGQGSLVTVSS

SEQ ID NO: 31179 - protein, 95 aa, Homo sapiens
ASGYTFTDYYIHWVRQVAGQGLEWMGIINCLGGSTMFAQEFQGRIAMTSDTSTSTVHMELSSLRSDDAAVYFCARGHSSGHFDYWGQGTLVTVSS

SEQ ID NO: 31180 - protein, 95 aa, Homo sapiens
ASGYTFTYYYVHWVRQAPGQGLEWMGIINPLDGSTTFAQNFQGRVTMTTDTSTSTAYMDLSSLRSEDTALYYCARGHSSGHFDYWGQGTLVTVSS

SEQ ID NO: 31181 - protein, 98 aa, Homo sapiens
GASGFIFRTYGMHWVRQAPGKGLEWVAFIWHDGSNKYYGDSVKGRFTISRDNSKNTLYLQMNNLRVEDTAIYYCVGDPPRSGYAFDIWGQGTTVNVSS

SEQ ID NO: 31182 - protein, 98 aa, Homo sapiens
AASRFTFSTYGMHWVRQAPGKGLEWVAFIWFDGIHKYYADSVKGRFTISRDNSKNSLYLQMNSLRAEDTAVYYCVGDPPRSGYAFDIWGQGTMVTVSS

SEQ ID NO: 31183 - protein, 94 aa, Homo sapiens
VGSGFTFSSYWMGWVRQAPGKGLEWVANIKPDGGERAYMESMKGRFTISRDNAKKSLFLQINGLRAEDTAVYYCARASKGMDVWGHGTTVTVSS

SEQ ID NO: 31184 - protein, 94 aa, Homo sapiens
AASGFTFTNFWMSWVRQAPGKGLEWVANIKKDGSEKAYVDSVKGRFTISRDNAKNSLYLQMNSLRAEDTAVYFCARASKGMDVWGQGTTVTVSS

SEQ ID NO: 31185 - protein, 94 aa, Homo sapiens
AASGFSFSSYGMHWVRQAPGKGLEWVAVIWFDGSNKNYGDSVKGRFTISRDNSKNTLYLQMNSLRAEDTAVYYCASRSDGFDHWGQGTLVTVSS

SEQ ID NO: 31186 - protein, 94 aa, Homo sapiens
AASGFAFSSYGMHWVRQAPGKGLEWVAVIWYDGSNKYYADSAKGRFTISRDNSKNMLYLQMNSLRAEDTAVYYCASRSDGFDHWGQGTLVTVSS

SEQ ID NO: 31187 - protein, 92 aa, Homo sapiens
TVSGGSISSYYWSWIRQPPGKGLEWIGYVYYNGNTNYNPSLKSRVTISVDTSKNQFSLKLNSVTAADTAVYYCARHKGLDLWGQGTLVTVSS

SEQ ID NO: 31188 - protein, 92 aa, Homo sapiens
TVSGGSTRNFYWSWIRQPPGKGLEWIGYVFYSGATSYNPSLRSRVTISIDTSKNQFSLNLRSVTAADSAVYYCARHKGLDLWGQGMLVTVSS

SEQ ID NO: 31189 - protein, 92 aa, Homo sapiens
TIDGDSIGKNFWTWIRQSPEKGLQWIGFVFHNGERSYNPSLQNRVTISVDTSRKKFFLRLSAMTAADTGVYYCARHKGLDLWGQGIPVTVSS

SEQ ID NO: 31190 - protein, 92 aa, Homo sapiens
TISGASIGSFYWSWIRQPPGKGLQWVGFVSYSGSATYNPSLQSRVTISIDTSKKNFSLNLTSVTAADTAVYYCARHKGLDLWGQGILVTVSS

SEQ ID NO: 31191 - protein, 98 aa, Homo sapiens
TVSGGSISSSGYYWVWIRQPPGKGLEWIGSINYSGSSYYNPSLKSRVTFPVDTSKNQVSLKLSSVTAADTAVYYCARRGRENYWVDYWGQGTLVTVSS

SEQ ID NO: 31192 - protein, 98 aa, Homo sapiens
TVSGDSIGSSDYYWGWIRQPPGKGLEWIGSIYHSGKAYYNPPLRSRVTISVDTSKNQFSLKVTSVTAADTAVYYCARRGRENYWVDYWGQGTLVTVSS

SEQ ID NO: 31193 - protein, 98 aa, Homo sapiens
ASGYTFSTYAIHWVRQAPGQSLEWMGWINTGSGYTKYSQDFQGRLTITRDTSASTAYMELTSLTSEDTAIYYCAKAGAAPPGNWFDSWAQGTLVTVSS

SEQ ID NO: 31194 - protein, 98 aa, Homo sapiens
ASGYTFTNHAIHWVRQAPGQSLEWMGWIAGGNGETKYSEKFQDRVSFTRDTSARSSHMELRSLLSEDTATYYCAKAGAAPPGNWFDSWGQGTQVTVSS

SEQ ID NO: 31195 - protein, 98 aa, Homo sapiens
AASGFTYSNYAMSWVRQAPGKGLEWVSAISNSGSSTYYADSVKGRFTISRDNSRNTLYLQMNSLRVEDTAIYYCATHMTAVTTALDYWGQGTLVTVSS

SEQ ID NO: 31196 - protein, 98 aa, Homo sapiens
AASGFTFSNYAMSWVRQAPGKGLEWVSTVSGNGVNTYYADSVKGRFTVSRDNSKNTLYLQMNSLRVEDTALYFCATHMTAVTTALDYWGQGTLVTVSS

SEQ ID NO: 31197 - protein, 101 aa, Homo sapiens
AASGFTLSGHWMSWVRQAPGKGPEWVANIKQDGSGEYYVDSVKGRFTVSRDNAKSSVFLQMNSLRVEDTAVYFCARGAYSSGWYPDYFDYWGQGTLVTVSS

SEQ ID NO: 31198 - protein, 101 aa, Homo sapiens
AASGFTFNSAWMSWVRQAPGKGLEWVANIKEDGSKQYYVDSVKGRFTISRDNTKNSLFLQMNSLRTEDTAVYYCARGAYSSGWYPDYFDYWGHGTLVTVSS

SEQ ID NO: 31199 - protein, 87 aa, Homo sapiens
AASGFTFSSYAMHWVRQAPGKGLEYVSAISSNGGSTYYANSVKGRFTISRDNSKNTLYLQMGSLRGEAVAGNYFDYWGQGTLVTVSS

SEQ ID NO: 31200 - protein, 87 aa, Homo sapiens
SASGFTFSTYAMHWVRQAPGKGLEYVSAISNNGGSTYYAESVKGRFTISRDSLRTEDTAVYYCVKDRGSIVRDFDYWGQGTLATVSS

SEQ ID NO: 31201 - protein, 95 aa, Homo sapiens
AASGFTFSSYAMSWVRQAPGKGLEWVSAVSSSGAITYYADSVKGRFTVSRDNSKNTLYLQMNSLRAEDTAVYYCAKGGINAFDIWGQGTMVTVSS

SEQ ID NO: 31202 - protein, 95 aa, Homo sapiens
AASQFTISTSAMTWVRQAPGKGLEWVSTINYSGGSTFYADSVKGRFTISRDNPKNTVFLQMNSLRPEDTALYYCAKGGINAFDIWGQGTMVTVSS

SEQ ID NO: 31203 - protein, 96 aa, Homo sapiens
AASGFSFSDYAMHWVRQAPGKGLEWVAVIWYDGSTKYYADSVKGRFTVSRDNSKNTLYLQINSLRAEDTAVYYCAREFKPSAMDVWGQGTTVTVSS

SEQ ID NO: 31204 - protein, 96 aa, Homo sapiens
AASGFTFNNYAMHWVRQTPGKGLEWVAVIWYDGSNKYYAESVKGRFTVSRDNSDNTLYLQMNSLGAEDTAVYYCAREFKPSAMDVWGQGTTVTVSS

SEQ ID NO: 31205 - protein, 92 aa, Homo sapiens
ASGFTFSKYWMHWVRQVPGKGLVWVSRIYTDGISMDYADSVKGRFTISRDNAKNTLYLQMNSLRAEDTAVYYCRGSGEFDYWGRGTLVTVSS

SEQ ID NO: 31206 - protein, 93 aa, Homo sapiens
AASGFNFSTYWMHWVRQAPGKGLVWVSRIYRDGRITNYADSVKGRFTISRDNAKNTVYLQMNSLRVEDTAVYYCRGSGEFDYWGQGTLVTVSS

SEQ ID NO: 31207 - protein, 94 aa, Homo sapiens
VASGFTFSSYAITWVRQAPGKGLEWVSFISSSSSAIHYANSVKGRFTISRDNAKNSLSLQMNSLRAEDTAVYYCARTSGWSDYWGQGTLVTVSS

SEQ ID NO: 31208 - protein, 94 aa, Homo sapiens
AASGFTFSSYSMNWVRQAPGKGLEWVSYISSSSSTIYYADSVKGRFTISRDNAKNSLFLQMNSLRAEDTAVYYCARTSGWSDYWGQGTLVTVSS

SEQ ID NO: 31209 - protein, 99 aa, Homo sapiens
VASGFTFSSYAMHWVRQAPGKGLEWVAIISYDGSNKYYADSVKGRFTISRDNSKNTLSLQMNSLRAEDTAVYYCARSHTGNYYYGMDVWGLGTTVTVSS

SEQ ID NO: 31210 - protein, 99 aa, Homo sapiens
AASGFTFSTYAMYWVRQAPGKGLEWVALIAYDGDKKYYADSVKGRFTISRDNSKDTLYLQMNSLRGEDTAVYFCARSHTGNYYYGMDVWGHGTTVTVSS

SEQ ID NO: 31211 - protein, 96 aa, Homo sapiens
ASGLIFSDHYMDWVRQAPGKGPEWVARIKNKADAYGTLYAASVRGRFTIAREDSMNSLYLQMNSLRTEDTAVYYCARVGYSGSEDYWGQGTLVTVS

SEQ ID NO: 31212 - protein, 96 aa, Homo sapiens
ASGLIFSDHYMDWVRQAPGKGPEWVARIKNKADAYGTLYAASVRGRFTISRDDSMNSLYLQMNSLRTEDTAVYYCARVGYSGSEDYWGQGTLVTVS

SEQ ID NO: 31213 - protein, 98 aa, Homo sapiens
AASGIIFSDHYMDWVRQAPGKGLEWVARITTKGDGYGTQYAASVKGRFTISRVDSKNSLYLQMNSLKTDDTAVYYCARVGYSGSEDYWGQGTLVTVSS

SEQ ID NO: 31214 - protein, 92 aa, Homo sapiens
AASGFSFSDYYMSWIRQAPGKGLEWVSAISGSGGSTYYADSVKGRFTISRDNSKNTLYLQMNSLRAEDTAVYYCALRRGDYWGQGTLVTVSS

SEQ ID NO: 31215 - protein, 92 aa, Homo sapiens
AASGFTFSSYAMSWVRQAPGKGLEWVSAISDSGGSTYYADSVKGRFTISRDNSKNTLYLQMNSLRAEDTAVYYCALRRGDYWGQGTLVTVSS

SEQ ID NO: 31216 - protein, 94 aa, Homo sapiens
AASGFTFSSPTMTWVRQAPGMGLEWVSSIAPNGGYTYYADSVKGRFTISRDNSKNTLYLQMNSLRAEDTAVYYCARGSYGPDVWGQGTTVTVSS

SEQ ID NO: 31217 - protein, 93 aa, Homo sapiens
AASGFTFSTYYMTWVRQAPGKGLEWVSSIGGGGVSTYYADSVKGRFTISRDNSQNTLFLQMNGLRAEDTAVYYCARGSYGPDVWGQGTTITVS

SEQ ID NO: 31218 - protein, 95 aa, Homo sapiens
AASGFTFRTFWMTWLRQLPGKGLEWVAILKPDGTETYYVDSVRGRFTISRDNAKNSLFLQMNNLRAEDTAVYFCARDNNDLFDYWGQGTLVTVSS

SEQ ID NO: 31219 - protein, 95 aa, Homo sapiens
AASGFTFRTYWMSWVRQAPGKGLEWVANINPDGSADFYVDSVRGRFTISRDNAKNSLSLQMNTLRAEDTAVYYCARDNNDLFDYWGQGTLATFSS

SEQ ID NO: 31220 - protein, 95 aa, Homo sapiens
AASGFTFRTYWMSWVRQAPGKGLEWVANINPDGSADFYVDSVRGRFTISRDNAKNSLSLQMNTLRAEDTAVYYCARDNNDLFDYWGQGTLVTFSS

SEQ ID NO: 31221 - protein, 96 aa, Homo sapiens
AGSEFTFSTYGMYWVRQAPGKGLEWVSYISESSSAKYYADSVKGRFTISRDNAKNSMFLQMNSLRAEDTAVYYCARLRSGGYADYWGQGTLVTVSS

SEQ ID NO: 31222 - protein, 96 aa, Homo sapiens
AASGFTFRTYGMYWVRQAPGKGLEWVSYISDTISTTYYADSVKGRFTISRDNAQNSLYLQMNSLRDEDTAVYYCARLRSGGYADYWGQGTLVTVSS

SEQ ID NO: 31223 - protein, 96 aa, Homo sapiens
AVSGFTFRTYGMNWVRQAPGKGLEWVSYISETGTTMYYADSVQGRFTISRDNAKNSLYLQMNSLRDEDTAVYYCARLRSGGYADYWGQGTLVTVSS

SEQ ID NO: 31224 - protein, 96 aa, Homo sapiens
AASGFTFRTYGMYWVRQAPGKGLEWVSYISDTITTTYYADSVKGRFTISRDNAQNSLYLQMNSLRDEDTAVYYCARLRSGGYADYWGQGTLVTVSS

SEQ ID NO: 31225 - protein, 95 aa, Homo sapiens
AASGFTFGNYDMHWVRQAPGKGLVWVARINNDGDSITYADSVKGRFTISRDNAKNTVYVQMNSLRVEDTAVYYCARDWWGSLEYWGQGTLVTVSS

SEQ ID NO: 31226 - protein, 95 aa, Homo sapiens
AASGFTFSIYDIHWVRQVPGKGLVWVSRIKADGSDTTLADSVKGRFSISRDNAKNTVYLQMNSLRAEDTAVYFCARDWWGSLEYWGQGVLVTVSS

SEQ ID NO: 31227 - protein, 95 aa, Homo sapiens
AASGFTFSTYSMNWVRQAPGKGLEWVSYTSSSSSTIYYADSVKGRFTISRDNAKNSLYLQMNSLRAEDTAVYYCARDDYYYFDYWGQGTLVTVSS

SEQ ID NO: 31228 - protein, 95 aa, Homo sapiens
AASGFTFITYSMNWVRQAPGKGLEWVSYISSSSSTIYYADSVKGRFTISRDNAKNSLYLQMNSLRDEDTAVYYCARDDYYYFDYWGQGTLVTVSS

SEQ ID NO: 31229 - protein, 96 aa, Homo sapiens
ISGDSVSSNSATWNWIRQSPSRGLEWLGRTYYKSKWFNDYAESVKSRITINPDTSKNQFSLQLNSVTPEDTAVYYCARGGAKFDYWGQGTLLTVSS

SEQ ID NO: 31230 - protein, 96 aa, Homo sapiens
ISGDSVSSNSAVWNWIRQSPSRGLEWLGRTYYRSKWYNDYAVSVKSRIIINPDTSKNQFSLQLNSVTPEDTAVYYCARGGAKFDYWGQGTLVTVSS

SEQ ID NO: 31231 - protein, 94 aa, Homo sapiens
SGFTFSSYWISWVRRAPGKGLEWVANIKKDGSERYYEDSVKGRFTISRDNAKNSVYLEMNNLRAEDTAVFYCARDPDGHYFDYWGQGALVIVSS

SEQ ID NO: 31232 - protein, 96 aa, Homo sapiens
VGSGFTFSNFWMSWVRLPPGKGLEWVANIKKDGSERYYADSVRGRFTISRDNAKNSVYLQINSPRAEDTAVYYCARDPDGHYFDYWGQGALVTVSS

SEQ ID NO: 31233 - protein, 96 aa, Homo sapiens
VVSGFTFSNFWMSWVRLPPGKGLEWVANIKKDGSERYYADSVRGRFTISRDNAKNSVYLQINSPRAEDTAVYYCARDPDGHYFDYWGQGALVTVSS

SEQ ID NO: 31234 - protein, 96 aa, Homo sapiens
VVSGFTFNNFWMSWVRLPPGKGLEWVANIKKDGSEKYYADSVRGRFTISRDNAKNSVYLEINSPRAEDTAVYYCARDPDGHYFDYWGQGTLVTVSS

SEQ ID NO: 31235 - protein, 96 aa, Homo sapiens
AVSGFTFSNFWMSWVRLPPGKGLEWVANIKKDGSERYYADSVRGRFTISRDNAKNSVYLQINSPRAEDTAVYYCARDPDGHYFDYWGQGALVTVSS

SEQ ID NO: 31236 - protein, 95 aa, Homo sapiens
AASGFTFSSCWMNWVRQAPGKGLEWVANIKKDGSEKYYVDSVKGRFTISRDNAKNSLYLQMNSLRAEDTAVYYCARGSSGALDIWGQGTMVTVSS

SEQ ID NO: 31237 - protein, 95 aa, Homo sapiens
AASGFTFSSYWMNWVRQAPGKGLEWVANMKQDGSGKYYVDSVKGRFTISRDNAKNSLYLQVNSLRAEDTAVYYCARGSSGALDIWGQGTMVTVSS

SEQ ID NO: 31238 - protein, 97 aa, Homo sapiens
ISGDTVSDTGLAWNWIRLSPSRGLEWLGRTFYNFKWFNEYSPSVRGRITFNADTSNNQFSLQLNSVTPDDTAMYYCARGADRSLDYWGQGILVTVSS

SEQ ID NO: 31239 - protein, 97 aa, Homo sapiens
ISGYGVSADGVAWNWIRQSPSRGLEWLGRTFYRSKWYFEYGVSVKGRMTISPDTTRNQFSLHVRAVTPEDTAVYYCARGADRSLDYWGQGTLVTVSS

SEQ ID NO: 31240 - protein, 93 aa, Homo sapiens
AASGFAFNTYWMTWARQVPGKGPEWVANIKYSGSEIYYVDSVRGRFTISRDNAKNSLYLEMNSLRVDDTAVYYCARAISMDVWGQGTTVTVSS

SEQ ID NO: 31241 - protein, 93 aa, Homo sapiens; identical to SEQ ID NO: 31240

SEQ ID NO: 31242 - protein, 93 aa, Homo sapiens
AASGFNFRTYWMTWVRQVSGRGLEWVANINPDGTETYYVDSVNGRFTISRDNAKNSLYLQLDSLRVDDTALYFCARAISMDVWGKGTTVIVSS

SEQ ID NO: 31243 - protein, 93 aa, Homo sapiens
AASGFTFRSFWMTWVRQAPGKGLEWVANINHDGSEKYYVDSVEGRFTISRDNAKNSLYLQLNSLRAEDTAAFYCARAISMDVWGQGTTVTVSS

SEQ ID NO: 31244 - protein, 94 aa, Homo sapiens
AASGFSFSNYWMSWVRQAPGKGLEWVANIKEDGSEKFYVDSVKGRFTISRDDAKKSLYLQMNSLRAEDTAVYYCAKDNDGFDIWGQGTMVSVSS

SEQ ID NO: 31245 - protein, 94 aa, Homo sapiens
VASGFTFSSFWMSWVRQAPGKGLEWVANINYDGSEKYSMDSVKGRFTISRDNPENSLYLQMNSLSAEDTAVYYCAKDNDGFDIWGQGTMVTVSS

SEQ ID NO: 31246 - protein, 99 aa, Homo sapiens
TTSGFSFGDYAMSWVRQAPGKGLEWVGFIRSKRYGGTIQYAASVRGRFTISRDDSKSIAYLQMNSLKTEDTAVYYCGVTTYYYYGMDVWGQGTTVTVSS

SEQ ID NO: 31247 - protein, 99 aa, Homo sapiens
TASGFTFGDYAMSWVRQAPGKGLEWLGFIRSKAYGGTTEYAASVKGRFTISRDDSKSIAYLQMNSLKTEDTAVYYCGVTTYYYYGMDVWGQGTTVTVPS

SEQ ID NO: 31248 - protein, 98 aa, Homo sapiens
AASGFSFTVYWMYWVRQAPGKGLVWVSKINNDGSGSTCADSVKGRFTISRDNAKNTVSLQMNSLRAEDTAVYYCARGGRGGLYYIDYWGQGTQVTVSS

SEQ ID NO: 31249 - protein, 96 aa, Homo sapiens
SGLSFNIYWMYWFRQAPGKGLEWVSRIIDDESDAIYADSVKGRFTISRDNAKNTLSLQLNSLRVEDTAIYYCARGGRGGLYYIDYWGQGTLVTVSS

SEQ ID NO: 31250 - protein, 95 aa, Homo sapiens
AASGFSFDDSAMHWVRQAPGKGLEWVSLISRDGANTYYADSVKGRFTISRDTSKNSLYLQMSSLRTEDTALYYCARGGQWLIRNWGQGTLVTVSS

SEQ ID NO: 31251 - protein, 95 aa, Homo sapiens
AASGFIFDDYAMHWVRQAPGKGLEWVSLIGGDGVRTYYADSVKGRFTISRDNSKNSLYLQMNSLRTDDTAFYYCARGGQWLIRNWGQGTLVTVSS

SEQ ID NO: 31252 - protein, 97 aa, Homo sapiens
AASGFIFSDYYMSWVRQAPGKGLEWVANIDQQGSDTYYADSVKGRFTVSRDNAQNSLYLQMNSLRAEDTAVYFCARGIGTYALFAYWGQGTLVTVSS

SEQ ID NO: 31253 - protein, 96 aa, Homo sapiens
AASGFTFSDYYMSWVRQAPGKGLEWVANIQQHGSDKFYVDSVKGRFTISRDNSKNLLYLQMDSLRVEDTAVYYCARGIGTYALFAYWGQGALVTVS

SEQ ID NO: 31254 - protein, 93 aa, Homo sapiens
AASGFTLSSYVMSWVRQAPGKGLEWVSLIDSADGKAYYADSVKGRVTISRDDSKNTLYLQMNRLSAEDTAVYYCAKDRMAANWGQGTLVTVSS

SEQ ID NO: 31255 - protein, 93 aa, Homo sapiens
AASGFTFSTYGMSWVRQAPGRGLEGVSSIGSGGISAYYADSVKGRFTISRDNSKNTLYLEMNSLRAEDTAIYYCAKDRMAANWGQGTLVTVSS

SEQ ID NO: 31256 - protein, 94 aa, Homo sapiens
AASGFTFSGYWMDWVRQGPGKGLMWVSRLNSDGSITSYADSVKGRFTISRDNAKNTLSLQMNSLRAEDTAVYYCARGGRYFDLWGRGTLVTVSS

SEQ ID NO: 31257 - protein, 94 aa, Homo sapiens
AASGFTFSSYWMHWVRQAPGKGQVWVSRMHSDGSTTTYAESVKGRFTISRDNAKNTLYLQMNSLRVEDTAVYYCARGGRYFDLWGRGTLVTVSS

SEQ ID NO: 31258 - protein, 96 aa, Homo sapiens
AASGFTFSDYYMIWMRQAPGKGLEWVSYISNSGSIKYYADSVKGRFTISRDNTKNSIYLQMNSLRVEDTAVYYCARHIVVVTAPPWGQGTLVTVSS

SEQ ID NO: 31259 - protein, 96 aa, Homo sapiens
AASGFTFSDYYMIWIRQAPGKGLEWVSYISKSGSIKYYADSVKGRFTISRDNTKNSIYLQMNSLRVEDTAVYYCARHIVVVTAPPWGQGTLVTVSS

SEQ ID NO: 31260 - protein, 96 aa, Homo sapiens
AASGFTFSDYYMSWIRQAPGKGLEYISYISGNGYTIYYADSVKGRFTISRDNAKNSLYLQMNSLRAEDTAVYYCARHIVVVTAPPWGQGTLVTVSS

SEQ ID NO: 31261 - protein, 96 aa, Homo sapiens
AASGFTFSDYYMIWIRQAPGKGLEWVSYISSSGSIVYYADSVKGRFTISRDNAKNSLYLQMNSLRAEDTAVYYCARHIVVVTAPPWGQGTLVTVSS

SEQ ID NO: 31262 - protein, 96 aa, Homo sapiens
AASGFTFSDYYMTWIRQAPGKGLELVSYISNSGGMIYYADSVKGRFTISRDNAKNSLYLQMNSLRAEDTAVYYCARHIVVVTAPPWGQGTLVTVSS

SEQ ID NO: 31263 - protein, 96 aa, Homo sapiens
AASGFTFSDYYMSWIRQAPGKGLEYLSHISGNGYTIYYADSVKGRFTISRDNAKNSLYLQMNSLRAEDTAVYYCARHIVVVTAPPWGQGTLVTVSS

SEQ ID NO: 31264 - protein, 96 aa, Homo sapiens; identical to SEQ ID NO: 31261

SEQ ID NO: 31265 - protein, 92 aa, Homo sapiens
AASGFTFNTYWMHWVRQVPGKGLLWVSRINSDGTLTTYADSVKGRFTISRDNAKNTLHLQMNSLRAEDTAVYYCTRGLGDHWGQGTLVNVSS

SEQ ID NO: 31266 - protein, 92 aa, Homo sapiens
AASGFIFSGYWMHWVRQVPGKGLVWVSRINGDGSMTTYADSVKGRFTISRDNAHNTLFLQMNSLTVDDTAVYYCTRGLGDHWGQGALVTASS

SEQ ID NO: 31267 - protein, 93 aa, Homo sapiens
AASGFTFSSYAMTWVRQAPGKGLEWVSAIGTGGVAYNADFVKGRFIISRDNSKNTVYLQMNSLRAEDTAVYFCAKGGGWMDVWGKGTTVTVSS

SEQ ID NO: 31268 - protein, 94 aa, Homo sapiens
AASGFTFMSYGMTWVRQAPGKGLEWVSAISNSGGSTYYADSVKGRFTISRDNSKNTLYLQMNNLRAEDTAVYYCAKGGGWMDVWGEGTTVTVSS

SEQ ID NO: 31269 - protein, 100 aa, Homo sapiens
AASGFTFSSYAMSWVRQAPGKGLEWVSGISRSGGSTYYADSVKGRFTISRDNSKNTLYLQMNSLRAEDTAVYYCAKDRGAMIVVVIWDYWGQGTLVTVSS

SEQ ID NO: 31270 - protein, 100 aa, Homo sapiens
AASGFTFSSYAMSWVRQAPGKGLEWVSGISRSGGGTYYADSVKGRFTISRDNSKNTLYLQMNSLRAEDTAVYYCAKDRGAMIVVVIWDYWGQGTLVTVSS

SEQ ID NO: 31271 - protein, 100 aa, Homo sapiens
AASGFNFGNYAMSWVRQAPGKGLEWVSGISRDGDSTYYADSVKGRFTISRDNSKNTLHLHMNSLRAEDTAVYYCAKDRGAMIVVVIWDYWGQGTLVTVSS

SEQ ID NO: 31272 - protein, 99 aa, Homo sapiens
SSGFSFSTYSMNWVRQAPGKGLEWVSIVYGGGSSARYYADSVRGRFTISRDDSKNTLFLQMESLRVEDTAVYYCAKDRVVDGLFEIDFWGQGILVTVSS

SEQ ID NO: 31273 - protein, 99 aa, Homo sapiens
VASGFRFAGFSINWVRQAPGKGLEWVSIIYQRGATTYYADSVRGRFTMSRDDSRNAVFLQMNNLRDEDTAIYYCAKDRVVDGLFEIDFWGQGTLVTVSS

SEQ ID NO: 31274 - protein, 98 aa, Homo sapiens
AGSGFTFSDYHIGWIRQAPGKGLEWVSFIRSSSLHTSYADSVKGRFTISRDDAKNSVYLQMNSLRAEDTALYYCARDPVDGYAHFDHWGKGTLVSVSS

SEQ ID NO: 31275 - protein, 98 aa, Homo sapiens
AASGFTFSDYNIGWIRQAPGKGLEWVSFIRRSSLYTSYADSVKGRFTISRDDARNSVYLQMNSLRAEDTALYYCARDPVDGYAHFDHWGKGTLVSVSS

SEQ ID NO: 31276 - protein, 97 aa, Homo sapiens
EASGFTFSDFHMSWIRQAPGKGLEWVSYIRTAGSIYYSDSVKGRFTISRDNAKNSLHLHMNSLRADDTAVYYCARDPVDGYAHFDHWGQGTLVTVSS

SEQ ID NO: 31277 - protein, 111 aa, Homo sapiens
TQTLTLTCTFSGFSLRSTGVGVGWIRQPPGQALEWLALIYWDDDKYQRPSLKNRLTITKDTSKNQVVLTMTNMDPVDTATYYCAHLFYYDTNGYYRYFDYWGQGILVTVSS

SEQ ID NO: 31278 - protein, 111 aa, Homo sapiens
TQTLTLTCTFSGFSLTTSGVGVGWIRQPPGKALEWLALIYWDDDRRYRPFLKRGVTITKDTSKNQVVLTMTNMDPVDTATYFCAHLFYYDTNGYYRYFDYWGQGTLVTVSS

SEQ ID NO: 31279 - protein, 111 aa, Homo sapiens; identical to SEQ ID NO: 31278

SEQ ID NO: 31280 - protein, 95 aa, Homo sapiens
AASGFTFSSYDMHWVRQGTGKGLEWVAGIGTAADTYYVGSVKGRFTISRDDAKNSLYLEMNSLRADDTAIYYCARERTNYGMDVWGQGTTVTVSS

SEQ ID NO: 31281 - protein, 95 aa, Homo sapiens
AASGFTFRSYDMHWVRQATGKGLEWVSAIGTAGDTYYPGSVKGRFTISRENAKNSLYLQMNSLRAGDTAVYYCARERTNYGMDVWGQGTTVTVSS

SEQ ID NO: 31282 - protein, 97 aa, Homo sapiens
ASGYTFRAYAVQWVRQAPGQRLEWLGWVNGANGDTRYSERFQGRLTLRWDSYSSTAYMELTSLASEDTAVYYCARDLLSDSGFEFDYWGQGTLVTVS

SEQ ID NO: 31283 - protein, 98 aa, Homo sapiens
ASGYTFSNFAVQWVRQAPGQGLEWMGWINAGSGQPQYSQKFQGRISFTRDTSASTVYMELSGLRSEDTAVYYCARDLLSDSGFEFDYWGQGTLVTVSS

SEQ ID NO: 31284 - protein, 95 aa, Homo sapiens
ASGYTFINYYIHWLRQAPGQGLEWMGYINPKSGATIFPQKFQGRVTMTSDTSISTVHMELSSLRSDDTAFYYCARGPNTGCFDYWGQGTLVTVSS

SEQ ID NO: 31285 - protein, 95 aa, Homo sapiens
ASGYPFIDYYVHWWRQAPGQGPEWMGWINPKNGDTGYAQNFQGRVTMTRETSINTIYMELSRLRFDDRAIYYCARGPNTGCFDYWGQGTLVTVSS

SEQ ID NO: 31286 - protein, 94 aa, Homo sapiens
ASGYTFSGYYLHWMRQAPGQGLEWMGWMDPNSGDTANAHKFQGRVTMTRDRSINTAYMELSSLRSDDTAMYYCARGPNTGCFDYWGQGTLVTVS

SEQ ID NO: 31287 - protein, 95 aa, Homo sapiens
AASGFTFSTYGMHWVRQAPGKGLEWVAFIWSDGSSKYYADSVKGRFSISRDNSKNTLFLQINSLRAEDTAMYYCARDRGWYEDYWGQGTLVTVSS

SEQ ID NO: 31288 - protein, 95 aa, Homo sapiens
AASGFTFSSYGMHWVRQAPGKGLEWVAVIWNDGSNKLYSDSVKGRFTISRDDSKNTLYLQMNSLRAEDTAVYYCARDRGWYEDYWGQGTLVTVSS

SEQ ID NO: 31289 - protein, 93 aa, Homo sapiens
AASGLTFNTAWLSWVRQAPGKGLEWVGRIRSNTDGGTTDYAAPVKGRFTISRDDSKTTLYLQMDSLKIEDTAVYYCTTVGRFWGQGTLVTVSS

SEQ ID NO: 31290 - protein, 93 aa, Homo sapiens
AASGLTFRDAWMSWVRQAPGEGLEWVGRIKSIADGGTTDYSAPVKGRFTISRDDSQYMLYLQMNSLKSEDTAVYYCTTVGRFWGQGTLVTVSS

SEQ ID NO: 31291 - protein, 93 aa, Homo sapiens
AASGFTFSSYAMNWVRQAPGKGLEWVSVIYSGDNSTYYADSVKGRFTVSRDNSKNTLYLQMNRLRVEDTAVYYCAKGSYSDYWGQGTMVTVSS

SEQ ID NO: 31292 - protein, 93 aa, Homo sapiens
AASGFTFSSYAMTWVRQAPGKGLEWVSIIYSGGTTTYYADSVKGRFTISRDNSKNTLYLQMNSLRAEDTAVYYCAKGSYSDYWGQGTQVTVSS

SEQ ID NO: 31293 - protein, 94 aa, Homo sapiens
AASGFTFSNAWMSWVRQAPGKGLEWFARIKSHTDGGTTDYAAPVKGRFTISRDDSKNTLYLQMNSLKTEDTGVYYCVASWLDPWGQGTLVTVSS

SEQ ID NO: 31294 - protein, 94 aa, Homo sapiens
AASGFTFSNAWMSWVRQAPGLGLYWVGRIKSETVGGTTDYAAPVKGRFTISRDDSKSTVYLQMDSLKTEDTGVYYCVASWLDPWGQGTLVTVSS

SEQ ID NO: 31295 - protein, 93 aa, Homo sapiens
AASGFTFNIYWMHWVRQAPGEGLMWLSNINLDGTRAAYADSVKGRFTISRDNAKNTLYLQMNSLRAEDTAVYYCVRYPTFDYWGQGTLVTVSS

SEQ ID NO: 31296 - protein, 93 aa, Homo sapiens
AASGFTFSSYWMHWVRQAPGKGLVWVSRIHNDGSSTTYADSVKGRFTVSRDNAKNTLYLQMNSLRAEDTAVYYCVRYPTFDYWGQGTLVTVSS

SEQ ID NO: 31297 - protein, 93 aa, Homo sapiens
AASGFTFSNSYMTWVRQAPGKGLEWVSFVDGSDTIKYYTDSVKGRFTISRDNSKSTVYLQMNSLRAEDTAVYYCVKGTWAENWGQGTLVTVSS

SEQ ID NO: 31298 - protein, 93 aa, Homo sapiens
AASGFTFSNSYMMWVRQAPGKGLEWVSTISGSGDTTDYADSVKGRFTISRDNSKSTLYLQINSLRVDDTAVFYCVKGTWAENWGQGTLIIVSS

SEQ ID NO: 31299 - protein, 103 aa, Homo sapiens
AASGFTFNNYAMAWVRQAPGKRPEWVSVITGNGVDTYYIDSVKGHFTISRDNSKNTLFLQMNSLRAEDSAVYYCAKGTLPSCRGASCYPLDYWGQGTLVTVSS

SEQ ID NO: 31300 - protein, 103 aa, Homo sapiens; identical to SEQ ID NO: 31299

SEQ ID NO: 31301 - protein, 103 aa, Homo sapiens
AASGFTFSNYAMVWVRHLPGKGLEWVSVITGDGYNTWYVDSVKGRFTISRDNSKSTLFLQMNSLRAEDTAVYYCAKGTLPSCRGASCYPLDYWGQGTLVTVSS

SEQ ID NO: 31302 - protein, 96 aa, Homo sapiens
AASGFTFSNYWMSWVRQAPGKGLEWVANMNQDGSAKNYVDSVRGRFTISRDNAKKSLYLQMNSLRAEDTSVYYCARDDGYSRFEYWGQGTLVTVPS

SEQ ID NO: 31303 - protein, 95 aa, Homo sapiens
ASGFTFSNFWITWVRQAPGKGLEWVANINQDGSVKNHVASVRGRFTISRDNAKNSLYLQMNNLRDEDTAVYYCARDDGYSRFEYWGQGTLVTVSS

SEQ ID NO: 31304 - protein, 95 aa, Homo sapiens; identical to SEQ ID NO: 31303

SEQ ID NO: 31305 - protein, 96 aa, Homo sapiens
AASGFIFTEYWMSWVRQAPGKGLEWVANTNNNEGAKSYVDSVKGRFTISRDNAKNSVYLQMDSLRGEDTAVYYCARDDGYSRFEYWGQGVLVTVSS

SEQ ID NO: 31306 - protein, 93 aa, Homo sapiens
AASGFTFSNHEMNWVRQAPGKGLEWVSRISTSGSAIQYADSVKGRFTISRDNAKNSLYLQMNSLRAEDTAVYYCAGSGWFAYWGQGTLVTVSS

SEQ ID NO: 31307 - protein, 93 aa, Homo sapiens; identical to SEQ ID NO: 31306

SEQ ID NO: 31308 - protein, 93 aa, Homo sapiens
AASGFTFSNHEMNWVRQAPGKGLEWVSRISTSGSAIQYADSVKGRFTISRDNAKNSLYLQMNSLRDEDTAVYYCAGSGWFAYWGQGTLVTVSS

SEQ ID NO: 31309 - protein, 93 aa, Homo sapiens; identical to SEQ ID NO: 31306

SEQ ID NO: 31310 - protein, 93 aa, Homo sapiens
AASGFTFSNHEMNWVRQAPGKGLEWVSRISTSGSAIQYADSVKGRFTTSRDNAKNSLYLQMNSLRAEDTAVYYCAGSGWFAYWGQGTLVTVSS

SEQ ID NO: 31311 - protein, 93 aa, Homo sapiens
AASGFTFSNHEVNWVRQAPGKGLEWVSSISYSGSTIYYADSVKGRFTISRDNAKNSLYLQMNNLRAEDTAVYYCAGSGWFAYWGQGTQVTVSS

SEQ ID NO: 31312 - protein, 98 aa, Homo sapiens
AASGFTFSNAWMSWVRQAPGQGLEWVGRIKRRVDGGTIDYTSPVKGRFTISRDDSKDTLYLQMNSLKTEDTATYYCVAGLGTSDVDFWGQGALVTVSS

SEQ ID NO: 31313 - protein, 98 aa, Homo sapiens
VASGFTFSDAWMSWVRQAPGKGLEWVGRIKRRMHGGATDYSVPVRGRFTISRDDSKDTLYLQMNSLKTEDTAVYYCVAGLGTSDVDFWGQGALVTVSS

SEQ ID NO: 31314 - protein, 98 aa, Homo sapiens
AASGFTFSNAWMTWVRQAPGKGLEWIGRIKRKDHGGAIDYTAPVRGRFTISRDDSKNTLYLQMNSLKTEDTAVYYCVAGLGTSDVDFWGQGALVTVSS

SEQ ID NO: 31315 - protein, 98 aa, Homo sapiens
AASGFTFSNAWMAWVRQAPGKGLGWVGRIKRKIDGETTDYAAPVKGRFTISRDDSKSMLNLQMNSLKVEDTGLYYCVAGLGTSDVDFWGPGTLVTVSS

SEQ ID NO: 31316 - protein, 98 aa, Homo sapiens
TLSVGSISSSDYYWGWIRQPPGKGLEWIGSVYYSGSTYYNSSLKSRVTISIDTSKTQFFLKLTSVTAADTAVYYCARLPYFYYYMDVWGKGTTVTVSS

SEQ ID NO: 31317 - protein, 98 aa, Homo sapiens
TLSGGSISSSDYYWGWIRQPPGKGLEWIGSVYYSGSTYYNSSLKSRVTISIDTSKTQFFLKLTSVTAADTAVYYCARLPYFYYYMDVWGKGTTVTVSS

SEQ ID NO: 31318 - protein, 98 aa, Homo sapiens; identical to SEQ ID NO: 31317

SEQ ID NO: 31319 - protein, 98 aa, Homo sapiens; identical to SEQ ID NO: 31317

SEQ ID NO: 31320 - protein, 98 aa, Homo sapiens
TLSGGSISSSDYYWGWIRQPPGKGLEWIGSIYYSGSTYYNPSLKSRVTISIDTSKKQFSLKVTSVTAADTAVYYCARLPYFYYYMDVWGKGTTVTVSS

SEQ ID NO: 31321 - protein, 98 aa, Homo sapiens; identical to SEQ ID NO: 31317

SEQ ID NO: 31322 - protein, 97 aa, Homo sapiens
VSNGSMSTSDYYWGWIRQPPGKGLEWIGSIYYSGSTYYNPSLKSRLTISIDTSTKHFSLKLNSVTAADTAVYYCARLPYFYYYMDVWGKGTTVTVSS

SEQ ID NO: 31323 - protein, 95 aa, Homo sapiens
ASGDSFSDYTITWVRQATGQGLEWMGGIIPALGTVSYAHKFQGRVTITADEITSTAYMELTTLTSDDTAVYYCATDLRGGYFDYWGQGTVVTVSS

SEQ ID NO: 31324 - protein, 95 aa, Homo sapiens
ASGDSFSDYTITWVRQATGQGLEWMGGIIPALGTVSYAHKFQGRVTITADEITSTAYMELTTLTSDDTAVYYCATDLRGGYFDYWGQGIVVTVSS

SEQ ID NO: 31325 - protein, 95 aa, Homo sapiens
ASEDTFSSYAISWVRQAPGQGLEWMGGIIPQFGTVKYPQNFQGRVTITADESTDTAYMELSSLRSEDTAVYYCATDLRGGYFDYWGQGTLVNVSS

SEQ ID NO: 31326 - protein, 95 aa, Homo sapiens
ASEDTFSSYAISWVRQAPGQGLEWMGGIIPQFGTVKYPQNFQGRVTITADESTDTAYMELSSLRSEDTAVCYCATDLRGGYFDYWGQGTLVNVSS

SEQ ID NO: 31327 - protein, 95 aa, Homo sapiens
AASGFTFSDYYMSWIRQAPGKGLEWVSYIGSSTGTIYYTDSVKGRFTISRDNAKKSLYLEMNSLRAEDTAVYYCAREPGYRFDYWGQGTLVSVSS

SEQ ID NO: 31328 - protein, 95 aa, Homo sapiens
AASGFTLSDYYMSWIRQAPGKGLELVSYIGTRTGTTYYTDSVKGRFTISRDNAKKSLYLEMNSLRDEDTAVYYCAREPGYRFDYWGQGTLVSVSS

SEQ ID NO: 31329 - protein, 95 aa, Homo sapiens
ASGFTFSDYYMAWIRQAPGKGLEWVGCIISGGGGTIFYADSVKGRFTISRDNVENSLYLQMNSLRVEDTASYYCAREPGYRFDYWGQGTLVTVSS

SEQ ID NO: 31330 - protein, 95 aa, Homo sapiens
AASGFTFSDYYMSWIRQAPGKGLEWVSYISSSVDTIYYADSVKGRFTISRDNAKNSLYLQMNSLRVEDTAVYYCAREPGYRFDYWGQGTLVTVSS

SEQ ID NO: 31331 - protein, 95 aa, Homo sapiens
TSGFTFSDYYMTWIRQAPGKGLEWVGCISSGGGGNTFYADSVRGRFTISRDNVQNSLYLQMNSLRVEDTASYYCAREPGYRFDYWGQGTLVTVSS

SEQ ID NO: 31332 - protein, 95 aa, Homo sapiens; identical to SEQ ID NO: 31331

SEQ ID NO: 31333 - protein, 95 aa, Homo sapiens
AASGFSFSDYYMAWIRQAPGKGLEWVACINSGGGTMYYADSVKGRFTISRDNAKNSLYLQMNSLRVEDTASYYCAREPGYRFDYWGQGTLVTVSS

SEQ ID NO: 31334 - protein, 97 aa, Homo sapiens
ATTGFSFSDYFMTWIRQAPGKGLECVSYIGGGASGTGTIYYTDSVKGRFTISRDNAKKSLYLEMNSLRPEDSAVYYCAREPGYRFDYWGPGTLVSVS

SEQ ID NO: 31335 - protein, 97 aa, Homo sapiens
AASGFTFSDYFMTWIRQAPGKGLEWVSYIGGGTGGTGTIYYTDSVKGRFTISRDNAKKSLYLEMNSLRPEDSAVYYCAREPGYRFDYWGQGTLVSVS

SEQ ID NO: 31336 - protein, 95 aa, Homo sapiens
AASGFTFSDYYMTWIRQAPGKGLEWVSCIGSTSGTKYYTDSVRGRFTISRDNAKKSLYLEMNSLRAEDTAVYYCAREPGYRFDYWGQGTLVSVSS

SEQ ID NO: 31337 - protein, 95 aa, Homo sapiens
ASGFTFSDYYMAWIRQAPGKGLEWIGCITSGGGSTIFYADSVKGRFTISRDNVKNSLYLQMNSLRVEDTASYYCAREPGYRFDYWGQGTLVTVSS

SEQ ID NO: 31338 - protein, 95 aa, Homo sapiens
AASGFTFSDYYMSWIRQAPEKGLEWVSYIGTSTGTIYYTDSVKGRFTISRDNAKKSLYLEMNSLRAEDTAVYYCAREPGYRFDYWGQGTLVSVSS

SEQ ID NO: 31339 - protein, 95 aa, Homo sapiens
AASGFTFSDYYMGWIRQAPGKGLEWVSQISNTGNKIYNADSVKGRFTISRDNAENSLYLQMNSLRAEDTAVYFCAREPGYRFDYWGRGTLVTVSS

SEQ ID NO: 31340 - protein, 95 aa, Homo sapiens
AASGFTFSDYYMSWIRQAPGKGLEWVSYIGSSTGTIYYTDSVKGRFTISRDNAKNSLFLQMNSLRAEDTAVYYCAREPGYRFDYWGQGALVSVSS

SEQ ID NO: 31341 - protein, 95 aa, Homo sapiens
ASGFTFSDYYMAWIRQAPGKGLEWVGCIFSGGAGTIFYADSVKGRFTISRDNVENSLYLQMNSLRVEDTASYYCAREPGYRFDYWGQGTLVTVSS

SEQ ID NO: 31342 - protein, 95 aa, Homo sapiens
ASGFTFSDYYMTWIRQAPGKGLEWVGCISSGGGGTIFYADSVKGRFTISRDNVKNSLYLQMNSLRVEDTASYYCAREPGYRFDYWGQGTLVTVSS

SEQ ID NO: 31343 - protein, 95 aa, Homo sapiens
ASGYTFTSYGISWVRQAPGQGLEWMGWIGVHEVQINYQHQDRVTMTTDTSTSTAYMEVRSLRSDDTAVYFCARNTLLDGIKIDNWGKGTLVTVSS

SEQ ID NO: 31344 - protein, 95 aa, Homo sapiens
ASGYTFTSYGISWVRQAPGQGLEWMGWIGIHEVQINYQHQDRVTMTTDTSTSTAYMEVRSLRSDDTAVYFCARNTLLDGIKIDNWGKGTLVTVSS

SEQ ID NO: 31345 - protein, 95 aa, Homo sapiens; identical to SEQ ID NO: 31344

SEQ ID NO: 31346 - protein, 95 aa, Homo sapiens; identical to SEQ ID NO: 31343

SEQ ID NO: 31347 - protein, 100 aa, Homo sapiens
AASGFSFSSYAMSWVRQAPGKGLEWVSSITGSGGRTDYADSVKGRFTISRDNSKHMLYLQMNSLRADDTAVYFCAKCGSGGVCYWYFDLWGRGTLVTVSS

SEQ ID NO: 31348 - protein, 100 aa, Homo sapiens
AASGFSFSSYAMSWVRQAPGKGLEWVSTITGSGGRTDYADSVRGRFTISRDNSKYMVYLQMNSLRADDTAVYFCAKCGSGGVCYWYFDLWGRGTLATVSS

SEQ ID NO: 31349 - protein, 100 aa, Homo sapiens
AASGFKFSSYAMTWVRQAPGKGLEWVATFRVGGGGASYADSVKGRFTISRDDSKFSLYLQMNSLRVEDTAVYYCAKCGSGGVCYWYFDLWGPGTLVSVSS

SEQ ID NO: 31350 - protein, 100 aa, Homo sapiens
AASGFTFSSYAMSWVRQAPGKGLEWVSAISGSGGSTYYADSVKGRFTISRDNSKNTLYLQMNSLRAEDTAVYYCAKCGSGGVCYWYFDLWGPGTLVSVSS

SEQ ID NO: 31351 - protein, 96 aa, Homo sapiens
ASGYTFINYYMHWVRQAPGQGLEYMGVIKLSGGRTTYAQKFQGRVTITSDTSSSTVYMELSSLKSEDTAVYYCARELPDTLYFDYWGQGTLVTVSS

SEQ ID NO: 31352 - protein, 96 aa, Homo sapiens
ASGYSFTSYYMHWVRQAPGQGLEWMGIITPNDGGTAYTQKFRGRVTMTSDASTSTVYMELSSLRSEDTAVYFCARELPDTLYFDYWGQGTLVTVSS

SEQ ID NO: 31353 - protein, 98 aa, Homo sapiens
SGYTFTIHGIHWVRQAPGQRLEWMGWINAGNGGTQYSQKFQGRVTITRDTSANTAYMELTSLTSEDTAVYYCARAGWPQPPGNWFDPWGQGTLVTVSS

SEQ ID NO: 31354 - protein, 99 aa, Homo sapiens
ASGYTFTSHGVHWVRQAPGQRLEWMAWINAGNGNTKYSQKFQGRVTITRDKSASIVYMEMSSLTSEDTAVYFCARAGWPQPPGNWFDPWGQGTLVTVSS

SEQ ID NO: 31355 - protein, 98 aa, Homo sapiens
SGYTFTLHGIHWVRQAPGQRLEWMGWINAGNGHTKYSQKFQGRVTITTDTSATTAYMELSSLKSEDSAVYYCARAGWPQPPGNWFDPWGQGTLVTVSS

SEQ ID NO: 31356 - protein, 98 aa, Homo sapiens
SGYTFTLHGIHWVRQAPGQRLEWMGWINAGNGHTKYSQKFQGRVTITTDTSASTAYMELSSLRSEDSAVYYCARAGWPQPPGNWFDPWGQGTLVTVSS

SEQ ID NO: 31357 - protein, 92 aa, Homo sapiens
AGSGFIFSDFDMDWVRQAPGKGLEWVSYISSSANTKYYADSVKGRFTVSRDNAKNSLFLQLNSLRVEDTAVYYCTRGWLADGGQGTQVTVSS

SEQ ID NO: 31358 - protein, 94 aa, Homo sapiens
AASGFTFSTFELNWVRQAPGKGLEWVAYISGSGSGNIVYYADSVKGRFTISRDNAKNSLYLQMHSLRAEDTAIYYCTRGWLADWGQGTLVTVSS

SEQ ID NO: 31359 - protein, 101 aa, Homo sapiens
TVFGGSIISGDYYWGWIRQAPGRGLEFIGNFLRGGSTYYNPSLRSRVAISIDASKNQYSLRLTSVTASDTAIYYCARPATGRGGGSRFDPWGQGVLVTVSS

SEQ ID NO: 31360 - protein, 101 aa, Homo sapiens
TASGGSITSGGYYWGWVRQPPGKGLEWIANILYSGSTYYNPFLESRVTISVDASKNQLSLRLTSVTAADTAVYYCARPATGRGGGSRFDPWGQGTLVTVSS

SEQ ID NO: 31361 - protein, 100 aa, Homo sapiens
VSGGSIRRGFYYWGWIRQSPGKGLEWIGSIYYGGDTWYNPSLKSRITMSVDTSRNQFSLNLNSVTATDTAFYYCARPATGRGGGSRFDPWGQGTLVTVSS

SEQ ID NO: 31362 - protein, 101 aa, Homo sapiens
TASGGSITSGDYYWGWIRQAPGKGLEFIGNLLRGGSTYYNPSLKSRVTISIDASKNQYSLRLTSVTASDTAIYYCARPATGRGGGSRFDPWGQGTLVTVSS

SEQ ID NO: 31363 - protein, 94 aa, Homo sapiens
VVSEFTFSNYWMDWVRQAPGKGPEWVAGIKPDGSEQNYVDSVKGRFTVSRDNAKNSLYLQMNSLRAEDTAKYYCARGNRRAFDIWGQGTMVTVS

SEQ ID NO: 31364 - protein, 94 aa, Homo sapiens
AASGFTFSGSWMSWVRQAPGKGLDWVAIIKQDGSEKYYVDSVKGRFTISRDNAKNSLYLQMSSLRAEDTAVYYCARGNRRAFDIWGQGTMVTVS

SEQ ID NO: 31365 - protein, 98 aa, Homo sapiens
ASGYSFTTHGIHWVRQAPGQGLEWMGWIIPGNGNTQYSQKFQGRVTITRDTYANTAYMELKSLRSEDTAVYYCAKSGASPPGNWFDTWGQGTLVTVSS

SEQ ID NO: 31366 - protein, 98 aa, Homo sapiens
ASGYTFTTYGLHWVRQAPGQSLEWMGWIKIGDGYTKYSQYFQSRVTITRDTSASTAYMELSSLRSEDTAVYYCAKSGASPPGNWFDTWGQGTLVTVSS

SEQ ID NO: 31367 - protein, 98 aa, Homo sapiens
ASGYTFTSNGLHWVRQAPGQRLEWMGWIKTGDGYTKYSQYFQSRVTITRDTSATTFYMELSSLRSEDTAVYYCAKSGASPPGNWFDTWGQGTLVTVSS

SEQ ID NO: 31368 - protein, 98 aa, Homo sapiens
ASGYTFTTHGIHWVRQAPGQGLEWMGWIIPGNGNTQYSQKFQGRVTITRDTYANTAYMELRSLRSEDTAVYYCAKSGASPPGNWFDTWGQGTLVTVSS

SEQ ID NO: 31369 - protein, 102 aa, Homo sapiens
AASGFTFSSYWMSWVRQPPGKGLEWVANIKPDGSEKFYVDSVKGRFTISRDIAKNSLYLQMNSLRVDDTAVYYCARGDYFDSSGYYHDAFDVWGQGTMVTVS

SEQ ID NO: 31370 - protein, 103 aa, Homo sapiens
AASGFTFSSYWMSWVRQAPGKGLEWVANIKQDGSQKYYVDSVKGRFTISRDNAKNSLYLQMNRLRAEDTAVYYCARGDYFDSSGYYHDAFDVWGQGTMVTVSS

SEQ ID NO: 31371 - protein, 103 aa, Homo sapiens
NVSGVSITSGSVSYWNWIRQPAGKGLEWIGRVFSGGTTAYNPSLKSRVTISMDTSKNQFSLQLTSVTAADTAVYFCARGTDCYGGSCQIFDNWGQGTLVTVSS

SEQ ID NO: 31372 - protein, 103 aa, Homo sapiens; identical to SEQ ID NO: 31371

SEQ ID NO: 31373 - protein, 100 aa, Homo sapiens
GVSGGSIKTNNWWIWVRQPPGEGLEWIGEIQHRGNTNYNPSLKSRVTMSVDKSKNQFSLNLNSVTAADTAVYYCARDRGGKGRLDGFDIWGQGTRVTVSS

SEQ ID NO: 31374 - protein, 100 aa, Homo sapiens
GVSGGSISTDNWWIWVRQPPGEGLEWIGEIHHRHNTNYNPSLKSRLTMSLDRPKNQFSLNLNSVTAADTAVYYCARDRGGKGRLDGFDIWGQGTRVTVSS

SEQ ID NO: 31375 - protein, 100 aa, Homo sapiens
AVSGGSISSRNWWIWVRQSPGKGLEWIGEIYFDGKRNYDPSLKSRVIISLDKSKNQFSLQVNSVTAADTAVYYCARDRGGKGRLDGFDIWGQGTKVTVSS

SEQ ID NO: 31376 - protein, 100 aa, Homo sapiens
AASGFTFDNYAMTWVRQAPGKGLEWVSTIDGSGGATFYADSVNGRFTISRDNSKNTLYLQMNSLRAEDTAVYYCAKDGDDNRPPDCYDMWGQGTMVTVSS

SEQ ID NO: 31377 - protein, 100 aa, Homo sapiens
AASGFTFSTYAMTWVRRAPGKGLEWVSTISGGTENTYYADSVKGRFTVSRDNSKNTLYLHMNSLRVEDTAVYYCAKDGDDNRPPDCYDMWGQGTMVTVSS

SEQ ID NO: 31378 - protein, 98 aa, Homo sapiens
ASGYTFTSYAMNWVRQAPGQGLEWMGWINTNTGNPTYAQGFTGRFVYSLDTSVSTAYLQISSLKAEDTAVYYCARGTAAAGTDWLDPWGQGTLVTVSS

SEQ ID NO: 31379 - protein, 98 aa, Homo sapiens
ASGYTFTNYAMNWVRQAPGQGLEWMGWININTGNPTYAQGFTGRFVFSLDTSVSTAYLQIRGLKAEDTGVYYCARGTAAAGTDWLDPWGQGTLVTVSS

SEQ ID NO: 31380 - protein, 98 aa, Homo sapiens; identical to SEQ ID NO: 31378

SEQ ID NO: 31381 - protein, 91 aa, Homo sapiens
AASGFTLSNYWMNWVRQAPGKGLEWVASIKQYGSETYYVDSVKGRFTISRANARNSLDLLMNSLRAEDTAMYYCVTDVRYWGQGTMVTVAS

SEQ ID NO: 31382 - protein, 90 aa, Homo sapiens
ASGLIFSKYWMAWVRQAPGKGLEWVATIKQDGSDQNYLDSVKGRFIISRDNAKNSVYLQMNSLRAEDTAVYYCVTDVRYWGQGILVTVSS

SEQ ID NO: 31383 - protein, 101 aa, Homo sapiens
AASGFTFRNVWMSWVRQVPGKGLEWVGRVKSKSDGGTTNYAAPVEGRFTISRDDSQNTVYLEMNSLKTEDTGLYFCTTVFRYNSGSYSDYWGQGTLVTVSS

SEQ ID NO: 31384 - protein, 101 aa, Homo sapiens
AASGFTFSNTWMAWVRQVPGKGLEWVGRIKSRSDGGTTNYAAPVQGRFTISRDDSENKVFLQMNGLKTEDTAVYYCTTVFRYNSGSYSDYWGQGTLVTVSS

SEQ ID NO: 31385 - protein, 98 aa, Homo sapiens
GASGFTFSGYWMHWVRQAPGKGLVWVSHIMTNGATTTYADSVKGRFTISRDNTKNTLYLLMDSLRAEDTGVYYCARGSGNYYGPLDYWGQGTVVTVSS

SEQ ID NO: 31386 - protein, 97 aa, Homo sapiens
ASGFSFSTSWMHWVRQAPGKGLVWISRLDYGGGSMSYADPVKGRFTMSRDNAKSTLYLQMNSLRVEDTAIYYCARGSGNYYGPLDYWGPGTLVTVSS

SEQ ID NO: 31387 - protein, 103 aa, Homo sapiens
TQTLTLTCTFSGFSLTTSGVGVGWIRQSPGKALEWLALIYWDDDKRYSPSLKSRLTITKDTSKNQVVLTMTNMDPVDTATYYCAHGGWPFDYWGQGTLVTVSS

SEQ ID NO: 31388 - protein, 103 aa, Homo sapiens
TQTLTLTCTFSGFSLSTSGVGVGWIRQPPGKALEWLALIYWDDDKRYSPSLKSRLTITKDTSKNLMVLTMTNMDPVDTAIYYCAHGGWPFDYWGQGTLVTVSS

SEQ ID NO: 31389 - protein, 103 aa, Homo sapiens
TQTLTLTCTFSGFSLSTSGVGVGWIRQPPGKALEWLALIYWDDDKRYSPSLKSRLTITRDTSKNQVVLTMTNMDPVDTATYYCAHGGWPFDYWGQGTLVTVSS

SEQ ID NO: 31390 - protein, 103 aa, Homo sapiens
TQTLTLTCTFSGFSLSTSGVGVGWIRQPPGKALEWLALIYWDDDKRYSPSLKSRLTIATDTSKNQVVLTMTNMDPVDTGTYYCAHGGWPFDYWGQGTLVTVSS

SEQ ID NO: 31391 - protein, 103 aa, Homo sapiens
TQTLTLTCTFSGFSVSASGVGVGWIRQPPGKALEWLALIYWDDDKRYSPSVRSRLTITKDTSKNQVVLRMTNMDPVDTATYYCAHGGWPFDYWGQGTLVTVSS

SEQ ID NO: 31392 - protein, 103 aa, Homo sapiens
TQTLTLTCTFSGFSLSTSGVGAGWIRQPPGKALEWLALIYWDDDERYSPSLKSRLTITKDTSKNQMVLRMTNMDPVDTAIYYCAHGGWPFDYWGQGTLVTVSS

SEQ ID NO: 31393 - protein, 103 aa, Homo sapiens
TQTLTLTCTFSGFSLSTSGVGVGWIRQPPGKALEWLALLYWDDDKRYSPSLKSRLTITKDTSKNQVVLTMTNMDPVDTATYYCAHGGWPFDYWGQGTLVIVSS

SEQ ID NO: 31394 - protein, 103 aa, Homo sapiens
TQTLTLTCTFSGFSLSTSGVGVGWIRQPPGKALEWLALIYWDDDKRYSPSLKSRLTITKDTSKNQVVLTMTNMDPVDTATYYCAHGGWPFDYWGQGTLVTVSS

SEQ ID NO: 31395 - protein, 103 aa, Homo sapiens
TQTLTLTCTFSGFSLSTSGVGVGWIRQPPGKALEWLTLIYWDADKRYSPSLKNRLTITKDTSKNQVVLTMTNMDPVDTATYYCAHGGWPFDYWGQGTLVTVSS

SEQ ID NO: 31396 - protein, 94 aa, Homo sapiens
AASGFSFSNYWLSWVRQAPGKRLEWVANIKQDGSEKNYVDSVKGRFTISRDNAQNLLFLQMNSLRAEDTAVYYCARDKLGWTYWGQGTLVTVSS

SEQ ID NO: 31397 - protein, 94 aa, Homo sapiens
AASGFTFSNYWITWVRQAPGKRLEWVANIKQDGSEKNYVDSVKGRFTISRDNAQNSLYLQMNSLRAEDTAVYYCARDKLGWTYWGQGTLVTVSS

SEQ ID NO: 31398 - protein, 94 aa, Homo sapiens
AASGFTFNTYWMTWVRQAPGKRLEWVANIKQDGSETNYVDSVKGRFTISRDNAKNSLYLQMNSLRPEDTAMYYCARDKLGWTYWGQGILVTVSS

SEQ ID NO: 31399 - protein, 94 aa, Homo sapiens
AASGFSFSSYWLSWVRQAPGKRLEWVANIKQDGSEKNYVDSVKGRFTISRDNAQNLLFLQMNSLRAEDTAVYYCARDKLGWTYWGQGTLVTVSS

SEQ ID NO: 31400 - protein, 94 aa, Homo sapiens
TVSGGSINSYYWSWIRQPPGKGLEWIGYIFYSGGTNYNPSLKSRVAISVDTSKNQFFLKLRSVTAADTAVYYCARGGAPRPGYWGQGTLVTVSS

SEQ ID NO: 31401 - protein, 94 aa, Homo sapiens
SVSNSSIRSFYWSWIRQPPGKGLEWIGYIDDSGNTNYNPSLKSRVTISVDTSKKEVSLKLRSVIAADTAVFYCARGGAPRPGYWGQGTLVTVSS

SEQ ID NO: 31402 - protein, 97 aa, Homo sapiens
PSGFTFNIYEMNWVRQAPGKGLEWVSYISTSGSNKYYADSVKGRFTISRDNSKNSLYLQMNSLRVEDTAVYYCGREPSGYGYGMDVWGQGTTVTVSS

SEQ ID NO: 31403 - protein, 98 aa, Homo sapiens
AASGFTFSNYEMNWVRQAPGKGLEWVSYISSSGDTRYYTDSVKGRFTISRDNAKNSLYLQMNYLRAEDTAVYYCGREPSGYGYGMDVWGQGTTVTVSS

SEQ ID NO: 31404 - protein, 98 aa, Homo sapiens
AASGFTFSNYEMNWVRQAPGKGLEWVSYISSSGDTRYYTDSVKGRFTISRDNAKNSLYLQMNSLRAEDTAVYYCGREPSGYGYGMDVWGQGTTVTVSS

SEQ ID NO: 31405 - protein, 98 aa, Homo sapiens
AASGFTFSNYEMNWVRQAPGKGLEWVSYITTSGDKRYYTDSVKGRFTISRDNAKNSLYLQMNSLRAEDTAVYYCGREPSGYGYGMDVWGQGTTVTVSS

SEQ ID NO: 31406 - protein, 106 aa, Homo sapiens
AASGFTFSSYWMNWVRQAPGKGPEWVANIKHDGSDRHYADSVKGRFNIYRANAKNSLYLQMNSLRDDDTAVYFCARGLWEGHCSSTLCHPNWFDPWGQGTLVTVSS

SEQ ID NO: 31407 - protein, 106 aa, Homo sapiens
AASGFTFSSFWMTWVRQAPGKGLEWVANIKHDGGEQHYVDSVKGRFTISRDNAKNSLYLQMNSLRAEDTAVYYCARGLWEGHCSSTLCHPNWFDPWGQGTLVTVSS

SEQ ID NO: 31408 - protein, 94 aa, Homo sapiens
ASGYTFAGNAIHWVRQAPGQRLEWMGRIHAGNGNTKYSQRFQGRVTITRDTSATTAYMELSSLRSEDTAVYYCARGNSGYLDYWGQGTLVTVSS

SEQ ID NO: 31409 - protein, 93 aa, Homo sapiens
SGYTFTSHVVQWVRQAPGQGLEWVGWVSTASGNPKYSQKFQDRVTITRDTSASTAYMQLSSLRSEDTAVYYCARGNSGYLDYWGQGTLVTVSS

SEQ ID NO: 31410 - protein, 94 aa, Homo sapiens; identical to SEQ ID NO: 31408

SEQ ID NO: 31411 - protein, 94 aa, Homo sapiens
AGSEFTFSSYWMSWVRQPPGKGLEWVANIKPDGSEKYYVGSVKGRFTISRDNAKNSLYLQMNSLRAEDTAVYYCARGPLDGDYWGQGTLVTVSS

SEQ ID NO: 31412 - protein, 94 aa, Homo sapiens
AASGFTFSSYLMSWVRQAPGKGLEWVANIMEDGSEKYYVDSVEGRFTISRDNAKNSLYLQMNSLRAEDTAVYYCARGPLDGDYWGQGTLVTVSS

SEQ ID NO: 31413 - protein, 95 aa, Homo sapiens
ASGFTFSTYWMHWVRQVPGKGLVWVSRINSDETDTSYAASVKGRFTISRDNAKNTLYLQMNGLRVEDTAVYYCVRGATSGSLDYWGQGTLVTVSS

SEQ ID NO: 31414 - protein, 96 aa, Homo sapiens
AASGFTFSTYWMHWVRQVPGKGLVWVSRINSDETDTSYAASVKGRFTISRDNAKNTLYLQMNGLRVEDTAVYYCVRGATSGSLDYWGQGTLVTVSS

SEQ ID NO: 31415 - protein, 96 aa, Homo sapiens
AASGFTFSTFWMHWVRQAPGKGLVWVSRISPDASDTSYADSVKGRFTISRDSATNTLYLQMNSLRAEDTAVYFCVRGATSGSLDYWGQGTLVTVSS

SEQ ID NO: 31416 - protein, 107 aa, Homo sapiens
TQTLTLTCTFSGFSLNTPAVAVGWIRQPPGKALEWLAIIYWHDEKRFNPSLNTGISITKDTSKSQVVLTMATVDPVDTATYYCAHSRIAAPGLFDYWGQGILVTVSS

SEQ ID NO: 31417 - protein, 107 aa, Homo sapiens
TQTLTLTCTFSGFSLSTSGVGVGWIRQPPGKALEWLALIYWDDDKRYSPSLKSRLTITKDTSKNQVVLTMTNVDPVDTATYYCAHSRIAAPGLFDYWGQGLWVTVSS

SEQ ID NO: 31418 - protein, 94 aa, Homo sapiens
ASGFTFNIYWMTWVRQAPGKGLEWVANINDDGSKKTYVDSLRGRLTISRDNAKNSLYLQMNSLGAEDTAVYYCARLGHYYMDVWGKGTTVTVSS

SEQ ID NO: 31419 - protein, 95 aa, Homo sapiens
AASGFTFNTYWMSWVRQAPGKGLEWVANIKPDGSDKYYVDSLKGRFTISRDNAKNSLYLQMNSLRAEDTAVYYCARLGHYYMDVWGKGTTVTVSS

SEQ ID NO: 31420 - protein, 108 aa, Homo sapiens
TQTLTLTCTFSGFSLTTSGVGVGWFRQPPGKALEWLALIYWDDDKRYSPSLKSRLTITKDTSKNQVVLTMTNMDPVDTATYYCAHRRGYSSGRGVDYWGQGTLVTVSS

SEQ ID NO: 31421 - protein, 108 aa, Homo sapiens
TQTLTLTCTFSGFSLNTAGVGVGWFRQPPGKAPEWLALIYWDDDKRYIPSLQSRLTITKDTSKNQVVLTVTDMGPVDTATYYCAHRRGYSSGRGVDYWGQGALVTVSS

SEQ ID NO: 31422 - protein, 108 aa, Homo sapiens
TQTLTLTCTFSGFSLSTSGVGVGWFRQPPGKALEWLALIYWDDDKRYIPSLKSRLTITKDTSKNQVVLTMTDMDPVDTATYYCAHRRGYSSGRGVDYWGQGTLVTVSS

SEQ ID NO: 31423 - protein, 108 aa, Homo sapiens
TQTLTLTCTFSGFSLSTSGVGVGWFRQPPGKALEWLALIYWDDDKRYSTSLKSRLTITKDTSKNQVVLTMTNMDPVDTATYYCAHRRGYSSGRGVDYWGQGTLVTVSS

SEQ ID NO: 31424 - protein, 92 aa, Homo sapiens
AASRFTFRTYSMVWIRQAPGQGLEWVANINQDGSEKNYVDSVKGRFTISRDNAKNSLYLQMNSLRVEDTAVYFCARGPLDFWGQGTLVTVSS

SEQ ID NO: 31425 - protein, 92 aa, Homo sapiens
AASGFSFSSYWMSWVRQAPGKGLEWVASIKRDGSEKYYVDSVKGRFTISRDNAKNSLYLHMNSLRAEDTAVYYCARGPLDFWGQGTLVTVSS

SEQ ID NO: 31426 - protein, 92 aa, Homo sapiens
AASGFTFSKYPMGWVRQAPGKGLEWVSTVSGSGSNTYYADSVKGRFTISRDNSKNTLYLQINSLRVEDTAVYYCAKDQLLGWGQGTLVTVSS

SEQ ID NO: 31427 - protein, 92 aa, Homo sapiens
AASGFTFSKYAMGWVRQAPGKGLEWVSSLSDSGTNTYYADSVKGRFTISRDNSKNTLYLQMNSLRAEDTAVYYCAKDQLLGWGQGTLVIVSS

SEQ ID NO: 31428 - protein, 92 aa, Homo sapiens
AASGFTFSKYAMGWVRQAPGKGLEWVSSLGGSGTDTYYADSVKGRFTISRDNSKNTVYLQMNSLRAEDTAVYYCAKDQLLGWGQGTLVTVSS

SEQ ID NO: 31429 - protein, 92 aa, Homo sapiens; identical to SEQ ID NO: 31426

SEQ ID NO: 31430 - protein, 92 aa, Homo sapiens
AASGFTFSTYAMTWVRQAPGKGLEWVSGISGSGDSTYYADSVKGRFTISRDNAKNTLYLQMNSLRAEDTAVYYCAKDQLLGWGQGTLVTVSS

SEQ ID NO: 31431 - protein, 93 aa, Homo sapiens
AVYGGSFSDYYWSWIRQPPGKGLEWIGEINHSGSTNYNPSLKSRVTISVDTSKNQLSLKLSSVTAADTAVYYCARDYGDSGYWGQGTLVTVSS

SEQ ID NO: 31432 - protein, 93 aa, Homo sapiens
AVYGGSFSGYYWSWIRQPPGKGLEWIGEINHSGSTNYNPSLKSRVTISVDTSKNQFTLKLSSVTAADTAVYYCARDYGDSGYWGQGTLVTVSS

SEQ ID NO: 31433 - protein, 91 aa, Homo sapiens
AASGFSFSSYEMNWVRQAPGKGLEWVSYISTSGGTVYYADSVKGRFTISRDNAKNSLNLQMNSLRAEDTAIYYCAALWFDPWGQGALVTVS

SEQ ID NO: 31434 - protein, 90 aa, Homo sapiens
ASGFTFSNYEMNWVRQAPGKGLEWVSYITGSGGIVYYADSVKGRFTISRDNAKNSLHLQMNSLRAEDTAIYYCAALWFDPWGQGALVTVS

SEQ ID NO: 31435 - protein, 91 aa, Homo sapiens
AASGFSFSSYEMNWVRQAPGKGLEWVSYISTSGGTIYYADSVKGRFTISRDNAKNSLNLQMNSLRAEDTAVYYCAALWFDPWGQGALVTVS

SEQ ID NO: 31436 - protein, 92 aa, Homo sapiens
AASGFSFSSYEMNWVRQAPGKGLEWVAYSSGSGNIVYYADSVKGRFTISRDNAENSLYLQMNSLRAEDTAVYYCAALWFDPWGQGTLVTVSS

SEQ ID NO: 31437 - protein, 92 aa, Homo sapiens; identical to SEQ ID NO: 31436

SEQ ID NO: 31438 - protein, 92 aa, Homo sapiens
AASGFSFSSYEMNWVRQAPGKGLEWVAYSSTSGNTVYYADSVKGRFTISRDNVENSLYLQMNSLRAEDTAVYYCAALWFDPWGQGTLVTVSS

SEQ ID NO: 31439 - protein, 92 aa, Homo sapiens
AASGFSFSSYEMNWVRQAPGKGLEWVAYSTGSGNIVYYADSVKGRFTISRDNAENSLYLQMNSLRAEDTAVYYCAALWFDPWGQGTLVTVSS

SEQ ID NO: 31440 - protein, 91 aa, Homo sapiens
AASGFTFSNYEMNWVRQAPGRGLEWVSYINAGGSTYYADSVRGRFTISRDNANNLLYLQMNSLRVDDTAIYYCAALWFDPWGQGALVTVSS

SEQ ID NO: 31441 - protein, 92 aa, Homo sapiens
EASGFTFSSYEMNWVRQAPGKGLEWVSYISTSGSTIYYADSVKGRFTISRDNAKNSLYLQMNSLRAEDTAVYYCAALWFDPWGQGALVTVSS

SEQ ID NO: 31442 - protein, 92 aa, Homo sapiens
AASGFSFSSYEMNWVRQAPGKGLEWVAYTSGSGNIVYYADSVKGRFAISRDNAENSLYLQMNSLRAEDTAVYYCAALWFDPWGQGTLVTVSS

SEQ ID NO: 31443 - protein, 92 aa, Homo sapiens
AASGFSFSSYEMNWVRQAPGKGLEWVSYISGSGNTVYYADSVKGRFTISRDNAENSLYLQMNSLRAEDTAVYYCAALWFDPWGQGTLVTVSS

SEQ ID NO: 31444 - protein, 92 aa, Homo sapiens; identical to SEQ ID NO: 31436

SEQ ID NO: 31445 - protein, 92 aa, Homo sapiens
ASGYTFSRYPMHWLRQAPGQRPEWMGRINGGDGNTEYSQNFQGRVTIARDTSATTVYMVLNSLTFEDTAVYYCARGVGADYWGQGTLVTVSS

SEQ ID NO: 31446 - protein, 92 aa, Homo sapiens
ASGGTFSSYAISWVRQAPGQGLEWMGGINGGDGNTEYSQNFQGRVTIARDTSATTVYMVLNSLTFEDTAVYYCARGVGADYWGQGTLVTVSS

SEQ ID NO: 31447 - protein, 92 aa, Homo sapiens
ASGYTFSRYPMHWLRQAPGQRPEWMGRINGGDGNTEYSQKFQGRVTIARDTSATTVYMELSSLRFEDTAVYYCARGVGADYWGQGTLVTVSS

SEQ ID NO: 31448 - protein, 92 aa, Homo sapiens
ASGYTFSRYPMHWLRQAPGQRPEWMGRINGGDGNTEYSQNFQGRVTIARDTSATTVYMVLNSLRFEDTAVYYCARGVGADYWGQGTLVTVSS

SEQ ID NO: 31449 - protein, 90 aa, Homo sapiens
SGYSFTKYPIQWMRQAPGQTLEWMGWIIAGNGSTKYSQRFQDRVTLLRDAAAATVYMELSSLRPEDTALYYCARGVGADYWGQGTQVIVS

SEQ ID NO: 31450 - protein, 92 aa, Homo sapiens
ASGYTFSIYPMHWVRQAPGQRPEWMGWINAGNDNTQYSQKFQDRVTITRDTSASTAYMELSRLRIEDTAVYYCARGVGADYWGQGTLVTVSS

SEQ ID NO: 31451 - protein, 92 aa, Homo sapiens
AASGITLSNNAMTWVRQAPGKGLQWVADIRGGGDTYYADSVRGRFTISRDNSNNVLYLQMDSLRAEDTALYYCAGHGGSSYWGHGTLVTVSS

SEQ ID NO: 31452 - protein, 92 aa, Homo sapiens
AASGFSLIGNAMTWVRQAPGKGLEWVSTISGGHTTFYADSVRGRFTISKDDSRNTLYLQMDSLRADDTALYYCAGHGGSSYWGQGTLVTVSS

SEQ ID NO: 31453 - protein, 95 aa, Homo sapiens
AASGFTVNTNYMSWVRQAPGKGLEWVSVIYSGGSTYYADSVKGRFTISRHNSKNTLYLQMNSLRAEDTAVYYCVRDTDYYGMDVWGQGTTVTVSS

SEQ ID NO: 31454 - protein, 95 aa, Homo sapiens
AASGFIVSSNYMSWVRQASGKGLEWVSVIYSSGSTYYADSVKGRFTISRHISKNTLYLQMNSLRTEDTAVYYCVRDTDYYGMDVWGQGTTVTVSS

SEQ ID NO: 31455 - protein, 95 aa, Homo sapiens
EASGFTFSSHWMHWARQAPGKGLEWVATIKQDGTEKYFVDSVKGRFTISRDNAKNSLYLQMNRLRVEDTAVYYCVRGSGWFFDYWGQGILVTVSS

SEQ ID NO: 31456 - protein, 95 aa, Homo sapiens
AASGFTFSRYWMSWVRQAPGKGLEWVASIKQDGSEKYYLDSVKGRFTISRDNAKNSLYLQMNRLRVEDTAVYYCVRGSGWFFDYWGQGILVTVSS

SEQ ID NO: 31457 - protein, 95 aa, Homo sapiens
AASGFTFNNCYMHWVRQAPGKGLEWVANIKQDGAQKYYVDSVKGRFTISRDNAKNSLFLQMNSLRVEDTAVYYCVRGSGWFFDYWGQGTLVTVSS

SEQ ID NO: 31458 - protein, 95 aa, Homo sapiens; identical to SEQ ID NO: 31457

SEQ ID NO: 31459 - protein, 95 aa, Homo sapiens; identical to SEQ ID NO: 31457

SEQ ID NO: 31460 - protein, 95 aa, Homo sapiens
AASGFSFSSSEMNWVRQAPGKGLEWISYISSSGSTIFYADSVKGRFTVSRDNAKNSLYLQMSSLGAEDTALYYCARDRGFCFDPWGQGTLVTVSS

SEQ ID NO: 31461 - protein, 95 aa, Homo sapiens
GASGFTFSSSEMNWVRQAPGKGLEWVSYISRSGSTIFYADSVKGRFTISRDNAKNSLYLQMNSLRPEDTAVYYCARDRGFCFDPWGQGTQVTVSS

SEQ ID NO: 31462 - protein, 91 aa, Homo sapiens
AASGFTFSSYAMTWVRQAPGKGLEWVSTISGNGDNTFYADSVKGRFTISRDNSKNTLYLQMNSLRADDTALYYCAERIDYWGQGTLVTVSS

SEQ ID NO: 31463 - protein, 91 aa, Homo sapiens
AASGFTFNKYAITWVRQAPGKGLEWVSLISGNGNKTYYTDSVKGRFTISRDNSKSTVYLQMNSLRAEDTAIYYCAERIDYWGQGTLVTVSS

SEQ ID NO: 31464 - protein, 91 aa, Homo sapiens; identical to SEQ ID NO: 31462

SEQ ID NO: 31465 - protein, 97 aa, Homo sapiens
KGSGHSFVFWIGWVRQMPGKGLEWMGIIHPGDSDTRYSPSFQGQVTISADKSISTAYLQWNSLKASDTAMYYCVRQDGSGLFYFDYWGQGTLVTVSS

SEQ ID NO: 31466 - protein, 97 aa, Homo sapiens
KGSGYTFSYWIGWVRQMPGKGLEWMGVIHPGDSDTRYSPSFEGQVTISVDKSIRIAYLQWSSLKASDTAMYYCVRQDGSGLFYFDYWGQGTLVTVSS

SEQ ID NO: 31467 - protein, 92 aa, Homo sapiens
ASGYTFNRYPMNWVRQAPGQGLEWMGWINASTGNPTYAQAFTGRFVFSVDTSVSTAYLQISTLKAEDTAVYYCARGREGDYWGQGTQVTVSS

SEQ ID NO: 31468 - protein, 92 aa, Homo sapiens
ASGYSFNRYPMNWVRQAPGQGLEWMGWINASTGNPTYAQAFTGRFVFSVDTSVSTAYLQISTLKAEDTAVYYCARGREGDYWGQGTQVTVSS

SEQ ID NO: 31469 - protein, 92 aa, Homo sapiens
ASGYTFTSYAMNWVRQAPGQGLEWMGWISTNTGNPTYAQGFTGRFVFSLDTSVSTAYLQISSLKAEDTAVYYCARGREGDYWGQGTLVTVSS

SEQ ID NO: 31470 - protein, 103 aa, Homo sapiens
VASGFAFSGYGMHWVRQAPGKGLEWVAVIWYDGSNEYHADSVKGRFTISRDNSKNTLYLQMNSLRAEDTAVYYCARTYCTSATCYYYYGMDVWGQGTTVTVSS

SEQ ID NO: 31471 - protein, 103 aa, Homo sapiens
AASEFNFRSYGMHWVRQAPGKGLEWVAVIWYDGTNEYYAESVKGRFTISRDNSKNTLFLQMNSLRTEDTAVYYCARTYCTSATCYYYYGMDVWGQGTTVTVSS

SEQ ID NO: 31472 - protein, 92 aa, Homo sapiens
AASGFTFSNFVMSWVRQAPGKGLEWVSGLTSSGGSTYYADSVKGRFTISRDNSKNTLYLQMNSLRVEDTAVYYCANWGGLGHWGQGTLVTVS

SEQ ID NO: 31473 - protein, 93 aa, Homo sapiens
AASGIDFRNSVMNWVRQAPGKGLECVSSIIANGQNTYYADSVKGRFTISRDNSKNTLYLQMNSLRVEDTAIYYCANWGGLGHWGQGTLVTVSS

SEQ ID NO: 31474 - protein, 93 aa, Homo sapiens
VASGINFKNSVMNWVRQAPGRGLECVSTIIAGGQDTYYADFVKGRFTISRDNSKNMLYLQMNSLRVEDTAMYYCANWGGLGHWGQGTPVTVSS

SEQ ID NO: 31475 - protein, 93 aa, Homo sapiens; identical to SEQ ID NO: 31474

SEQ ID NO: 31476 - protein, 93 aa, Homo sapiens
AASGIDFRNSVMNWVRQAPGKGLECASSIIANGQNTYYADSVKGRFTISRDNSKNTLYLQMNSLRVEDTAIYYCANWGGLGHWGQGTLVTVSS

SEQ ID NO: 31477 - protein, 93 aa, Homo sapiens
VASGINFKNSVMNWVRQAPGHGLECVSTIIAGGQDTYYADFVKGRFTISRDNSKNMLYLQMNSLRVEDTAMYYCANWGGLGHWGQGTPVTVSS

SEQ ID NO: 31478 - protein, 93 aa, Homo sapiens
VASGINFKNSVMNWVRRAPGRGLECVSTIIAGGQDTYYADFVKGRFTISRDNSKNMLYLQMNSLRVEDTAMYYCANWGGLGHWGQGTPVTVSS

SEQ ID NO: 31479 - protein, 98 aa, Homo sapiens
GSGYRFTTYWIGWVRQMPGKGLEWLGMIYPGDSETKYNPSFEGRVTLSGDKSTSTVYLQWSSLKASDTAIYYCARLRSSSWKDASDIWGPGTLLTVSS

SEQ ID NO: 31480 - protein, 98 aa, Homo sapiens
ASGYRFTSYWIAWVRQMPGKGLEWMGIIYPGDSETTYSPSFQGQVTISADKSITTAYLQWSSLKASDTAMYYCARLRSSSWKDASDIWGQGTMVTVSS

SEQ ID NO: 31481 - protein, 101 aa, Homo sapiens
AASGFTFNNYAMTWVRQAPGKGLEWVSAISATGGSTYYADSVRGRFTISRDNSKNTLYLQMNSLRVEDTAVYYCAKGPRYYGSGSYYFDYWGQGTLVTVSS

SEQ ID NO: 31482 - protein, 102 aa, Homo sapiens
AASGFTFSSYAMTWVRQAPGKGLEWVSAISASSGSSTYYADSVTGRFTISRDNSKNTLYLQMNSLRAEDTAVYYCAKGPRYYGSGSYYFDYWGQGTLVTVSS

SEQ ID NO: 31483 - protein, 98 aa, Homo sapiens
AASGFTISDYFVDWVRQAPGKGLEWVGRSNNKAYGYITEYAASVKGRFTISRDDSKNSLYLQMNSLKTEDTALYYCTRATGGYDMDVWGQGTTVTVSS

SEQ ID NO: 31484 - protein, 98 aa, Homo sapiens
AASGFTFSAYFVDWVRQAPGKGLEWVGRSRNKLDSYITEYAASVKGRFTISRDESKNSVYLQMDSLKTDDTAIYYCTRATGGYDMDVWGQGTTVTVSS

SEQ ID NO: 31485 - protein, 98 aa, Homo sapiens
AASGFTFSSYNMNWVRQAPGKGLEWVASITGTTNYIYYADSVKGRFTISRDNAKNSLYLQMNNLGAEDTARYYCARAYGDYGYYFDYWGQGTLVTVSS

SEQ ID NO: 31486 - protein, 98 aa, Homo sapiens
AASGFTFSSYRMKWVRQAPGKGLEWVSSISSSSSYIYYADSVKGRFTISRDNAKNSLYLQMNSLRAEDTAVYYCARAYGDYGYYFDYWGQGTLVTVSS

SEQ ID NO: 31487 - protein, 96 aa, Homo sapiens
TVSGGSISSYYWSWIRQPPGKGLEWIGYIYYSGSTNYNPSLKSRVTISVDTSKNQFSLKLSSVTAADTAVYYCARGGSSGNWFDPWGQGTLVTVSS

SEQ ID NO: 31488 - protein, 95 aa, Homo sapiens
TVSGGSIRSYYWSWIRQPPGKGLEWIGYIYYIGSTTYNPSLESRVTISVDTSKNQFSLKLTSVTAADTAMYFCARGGSSGNWFDPWGQGTLVTVS

SEQ ID NO: 31489 - protein, 90 aa, Homo sapiens
ATSGFSFGNIWMSWVRQAPGKGLEWVANIKDDGSQKYYVESVRGRFTISRDNTKNSLYLQMDSLRVEDTAMYYCTSGSNWGQGALVTVSS

SEQ ID NO: 31490 - protein, 90 aa, Homo sapiens
VASGFDFSKDWMSWVRQAPGKGLEWVANIKHDGTEKYFGDSVKGRFSISRDNAENSLFLQMNYLRLEDTGTYYCTSGSNWGQGALVTVSS

SEQ ID NO: 31491 - protein, 90 aa, Homo sapiens; identical to SEQ ID NO: 31490

SEQ ID NO: 31492 - protein, 96 aa, Homo sapiens
ASGYTFTSYEMNWVRQATGQGLEWMGWMNPNSGNTGYSQKFQGRVTMARNTSISTAYMELSSLTSEDTAVYYCARGPPTSQYFQHWGQGTLVTVSS

SEQ ID NO: 31493 - protein, 96 aa, Homo sapiens
ASGYTFTSYDINWVRQATGQGLEWMGWMNPNSGNTDYAQNFQGRVTMTRNTSISTAYMDLSSLRSEDTAVYYCARGPPTSQYFQHWGQGTLVTVSS

SEQ ID NO: 31494 - protein, 96 aa, Homo sapiens
ASGYTFTSYDINWVRQATGQGLEWMGWMNPNSGNTGYAQKFQGRVTMTRNTSISTAYMELSSLRSDDTAVYYCARGPPTSQYFQHWGQGTLVTVSS

SEQ ID NO: 31495 - protein, 97 aa, Homo sapiens
AASGFTFSNSWMSWVRQAPGKGLEWVANIRPDGSEKNYVDSVKGRFTISRDNAEYSLYLQMYSLSAEDTAFYYCVRGGGSGWPFESWGQGTLVTVSS

SEQ ID NO: 31496 - protein, 97 aa, Homo sapiens
AASGFSFRTSWMAWVRQAPGKGLEWVANINQPGIEKNYVDAVKGRFTISRDNTDMLLYLQMNSLRAEDTAVYYCVRGGGSGWPFESWGQGALVTVSS

SEQ ID NO: 31497 - protein, 96 aa, Homo sapiens
AASGFTFSSSWMSWVRQAPGKGLEWVANINPDGSEQNYVDSVKGRLTISRDNAKNSLYLQLNSLRVEDTALYYCVRGGGSGWPFESWGQGTPVTVS

SEQ ID NO: 31498 - protein, 97 aa, Homo sapiens
AASGFTFRSSWTSWLRQAPGKGLEWVANIDPDGGEKNYLDSVKGRFVISRDNAKDSLSLQLNSLRAEDTAVYYCVRGGGSGWPFESWGQGTLVSVSS

SEQ ID NO: 31499 - protein, 94 aa, Homo sapiens
ASGYTFTSYAMNWVRQAPGQGLECMGWINTNTGRPTYAPGFTGRFVFSVDTSVSTAYLEISSLEAEDTAVYYCARDGGRRLDSWGQGALVTVSS

SEQ ID NO: 31500 - protein, 94 aa, Homo sapiens
ASAYSFTTYAIYWVRQAPGQGLAGMGWINTKTGRPTYAQGFSGRLVFSLDTSVSTAYLQINNLEAEDTAVYYCARDGGRRLDSWGQGTLVTVSS

SEQ ID NO: 31501 - protein, 95 aa, Homo sapiens
ASRYTFTDYPMHWVRQAPGQRLEWMGWISAGNGNTEYSQKFQGRVTITRDTSASTAYMELSSLRSEDTAVYYCATGSGYYSPDYWGQGTLVTVSS

SEQ ID NO: 31502 - protein, 95 aa, Homo sapiens
ASGYTFSSYALHWVRQAPGQRLEWMGWINGGNGDTKYSQKCQGRVTITRDTSASTAYMELSSLRSEDTAVYYCATGSGYYSPDYWGQGTLVTVSS

SEQ ID NO: 31503 - protein, 96 aa, Homo sapiens
AASGFTFSNYWMHWVRQAPGKGLVWVSRIYIDGSTTTYADSVVGRFTISRDNAKNTLYLQMNSLRAEDTAVYYCARGGAGGAFDIWGQGTIVTVSS

SEQ ID NO: 31504 - protein, 96 aa, Homo sapiens
AASGFTFSSYWMYWVRQAPGKGPVWVSHINSDGSSTTYADSVKGRFTISRDNAKNTLYLQMNSLRAEDTAVYFCARGGAGGAFDIWGQGTMVIVSS

SEQ ID NO: 31505 - protein, 96 aa, Homo sapiens
AASGFTFSGYWMYWVRQAPGKGPVWVSHINNDGSSTTYADSVKGRFTISRDNAKNTLYLQMNSLRAEDTAVYFCARGGAGGAFDIWGQGTMVIVSS

SEQ ID NO: 31506 - protein, 95 aa, Homo sapiens
VASGFTFSTYWMHWVRQVPGKGLVWVSRTYFDGSDTSYTDSVKGRFTISIDNAKNTLYLQMNSLRVDDTALYYCARDLGLARGYWGQGTLVTVSS

SEQ ID NO: 31507 - protein, 94 aa, Homo sapiens
ASAYAFNTYWMHWVRQAPGKGLVWVSRLRGDGSDISYADFVKGRFTISRDNAKNTLYLQMDSLRPEDTAVYYCARDLGLARGYWGQGTLVTVSS

SEQ ID NO: 31508 - protein, 100 aa, Homo sapiens
AASGFTFNAFGMNWVRQAPGKGLEWVAIIWFDGSIKYYGDSVKGRFTISRDNTKDTVYLQMNSLRVEDTAVYYCARYGSGRDLRDPFDYWGQGTLVTVSS

SEQ ID NO: 31509 - protein, 100 aa, Homo sapiens
AASGFSFFGHVMHWVRQPPGKGLEWVATTWPDESFKAYADSVKGRFTVSRDNSKSTLYLQMDSLRVEDTAIYFCARYGSGRDLRDPFDYWGQGTLVTVSS

SEQ ID NO: 31510 - protein, 95 aa, Homo sapiens
ASGFSFSSFWMSWVRQAPGKGLEFVTNINQDGSQKSYVDSVKGRFTISRDNAKKSVYLQMDSLRAEDTAVYYCARDPGYSEFDIWGQGTMVTVSS

SEQ ID NO: 31511 - protein, 96 aa, Homo sapiens
EASGFTFSDFWMSWVRQTPGKGLEFVANLNQDGSEKSYVDSVKGRFTISRDNAKNSVFLQMNSLRADDTAVYFCARDPGYSEFDIWGQGTAVTVSS

SEQ ID NO: 31512 - protein, 97 aa, Homo sapiens
TVSGGSVSSDSYYWSWIRQPAGKGLEWIGRIYSSGSTSNNPSLKSRVTISVDTSKNQFSLKLRSVTAADTAVYYCARDFGLYGMDVWGQGTTVTVSS

SEQ ID NO: 31513 - protein, 97 aa, Homo sapiens
TVSGGSISSGLYYWSWIRQPAGKGLEWIGRIYTSGSANYNPSLESRVTISVDTSKNQFSLKLSSVTAADTAVYYCARDFGLYGMDVWGQGTTVTVSS

SEQ ID NO: 31514 - protein, 97 aa, Homo sapiens; identical to SEQ ID NO: 31513

SEQ ID NO: 31515 - protein, 96 aa, Homo sapiens
VVSGGSFSGYYWSWIRQPPGKGLEWIGEINYSGETNYNPSLKSRVTLSIDTSKNQFSLELNSVTAADTAMYYCARDPYTADQFDYWGQGMLVIVSS

SEQ ID NO: 31516 - protein, 96 aa, Homo sapiens
GVYGGSFSGCYWSWIRQPPGKGLEWIGEINQSGSTNYNPSLKSRVTISIDTSKKQFSLKLNSVTAADTGVYYCARDPYTADQFDYWGQGILVTVSS

SEQ ID NO: 31517 - protein, 95 aa, Homo sapiens
AASGFTVSSNYMSWVRQAPGKGLEWVSAISGSGGSTYYADSVKGRFTISRDNSKNTLYLQMNSLRAEDTAVYYCANGGRYYFDYWGQGTLVTVSS

SEQ ID NO: 31518 - protein, 95 aa, Homo sapiens
EVSGFTVSSHALSWVRQAPGKGLEWVSLISDSDDTTDYADSVKGRFTISRDNSKNTLYLQMNSLRADDSAIYYCANGGRYYFDYWGQGTLVTVSS

SEQ ID NO: 31519 - protein, 100 aa, Homo sapiens
AASGFSFSDYFMDWVRQAPGKGLEWVGRIRDKPSNYTTEYAASVKGRFTISRDDSENSMYLQMNSLKIEDTAVYYCARDLRESWAFFDYWGQGILVTVSS

SEQ ID NO: 31520 - protein, 99 aa, Homo sapiens
TSGFSFRDHYMDWVRQAPGKGLEWVGRIRDRANSYTTEYAASVKGRFTISRDDSKNSLHLDMNNLKSEDTAVYYCARDLRESWAFFDYWGQGTLVAVSS

SEQ ID NO: 31521 - protein, 99 aa, Homo sapiens
TSGFTFSDHYMDWVRQAPGKGLEWVGRIRDRAHSYTTEYAASVKGRFTISRDDSKNSLHLDMNNLKSEDTAVYYCARDLRESWAFFDYWGQGTLVAVSS

SEQ ID NO: 31522 - protein, 99 aa, Homo sapiens
TSGFSFRDHYMDWVRQAPGKGLEWVGRIRDRANSYTTEYAASVKGRFTISRDDSKNSLHLDMNNLKSEDTAVYYCARDLRESWAFFDYWGQGILVAVSS

SEQ ID NO: 31523 - protein, 99 aa, Homo sapiens
TSGFSFRDHYMDWVRQAPGKGLEWVGRIRDRASSYTTEYAASVKGRFTISRDDSKNSLHLDMNNLKSEDTAVYYCARDLRESWAFFDYWGQGTLVAVSS

SEQ ID NO: 31524 - protein, 99 aa, Homo sapiens
TSGFTFSDHYMDWVRQAPGKGLEWVGRIRDRAKSYTTEYAASVKGRFTISRDDSKNLLHLDMNNLKSEDTAVYYCARDLRESWAFFDYWGQGTLVAVSS

SEQ ID NO: 31525 - protein, 97 aa, Homo sapiens
ASGFTFDRHWMHWVRQAPGKGLMWVARVRGDGLDSTYADSVKGRFTISRDNAKSTMYLQMNSLTDEDTAVYFCARDIVAGSGSLDYWGQGTLVTVSS

SEQ ID NO: 31526 - protein, 98 aa, Homo sapiens
AASGFTFRNYWMHWVRQVPGKGLVWVSRIKGDGSDTNYADSVKGRFTISRDNAKNTLYLQMNSLRVEDTAAYYCARDIVAGSGSLDYWGRGTLVTVSS

SEQ ID NO: 31527 - protein, 95 aa, Homo sapiens
AASGFTFSNAWMSWVRQAPGKGLEWVGRIKSKTDGGTTDYAAPVKGRFTISRDDSKNTLYLQMNSLKTEDTAVYYCTPDDAFDIWGQGTMVTVSS

SEQ ID NO: 31528 - protein, 95 aa, Homo sapiens; identical to SEQ ID NO: 31527

SEQ ID NO: 31529 - protein, 97 aa, Homo sapiens
ISGDSVSTKSIAWNWIRQSPSRGFEWLGRTYYRSKWYNEYAESVKSRIVVNPDTSKNQFSLHLNSVTPEDTAVYYCARGTLRTFDIWAQGTMVTVSS

SEQ ID NO: 31530 - protein, 97 aa, Homo sapiens
ISGDSVSTSSAAWNWIRQSPSRGFEWLGRTYYRSKWHNDYAVSVKSRIVVNPDTSKNQFSLHLNSVTPEDTAVYYCARGTLRTFDIWAQGTMVTVSS

SEQ ID NO: 31531 - protein, 97 aa, Homo sapiens
ISGDSVSTKSTAWNWIRQSPSRGFEWLGRTYYRSKWYNDYAESVKSRIVVNPDTSKNQFSLHLNSVTPEDTAVYYCARGTLRTFDIWAQGTMVTVSS

SEQ ID NO: 31532 - protein, 97 aa, Homo sapiens
ISGDSVSTSSAAWNWIRQSPSRGFEWLGRTYYRSKWYNDYAVSVKSRIVVNPDTSKNQFSLHLNSVTPEDTAVYYCARGTLRTFDIWAQGTMVTVSS

SEQ ID NO: 31533 - protein, 97 aa, Homo sapiens
ISGDSVSSNSVAWNWIRQSPSRGLEWLGRTYYRSKWYNEYEVSVKSRVTINPDTSKNQFSLQLNSVTPEDTAVYYCARGTLRTFDIWGRGTMVTVSS

SEQ ID NO: 31534 - protein, 90 aa, Homo sapiens
AASGFTFSSYGIHWVRQAPGKGLEWVALISNDGRNEYCADSVKGRFTISRDNSKNTLYLQMNSLRAEDTAVYYCTNFAYWGQGTLVTVSS

SEQ ID NO: 31535 - protein, 90 aa, Homo sapiens
AASGFTFSTYGMHWVRQAPGKGLEWVALISYAGSEEYYADSVKGRFTVSRDNSKNTVYLQINSLRAEDTAVYYCTNFAYWGQGTLVTVSS

SEQ ID NO: 31536 - protein, 104 aa, Homo sapiens
ISGDSVSSNSAAWNWIRQSPSKGLEWLGRTYYRSKWYNDYAVSVKSRITINPDTSKNQFSLQLNSVTPEDTAVYFCARGGRGYCTSTTCYFDYWGRGTLVTVSS

SEQ ID NO: 31537 - protein, 104 aa, Homo sapiens
ISGDSVSSNSAAWNWIRQSPSRGLEWLGRTYYRSKWYNDYAISVKSRITINPDTSKNQFSLQLNSVTPEDTAVYYCARGGRGYCTSTTCYFDYWGQGALVTVSS

SEQ ID NO: 31538 - protein, 94 aa, Homo sapiens
GASEFTFNTVGVHWVRQAPGKGLEWISYIPPTGISTSTFYADSVKGRFTISRDNSKSSVYLQLNSLRVEDTAVYFCASTKGGYWGQGILVTVSS

SEQ ID NO: 31539 - protein, 94 aa, Homo sapiens
GASGFTFNSFGVHWVRQAPGKGLEWVSYIPSTDISTSTFYADSVKGRFTISRDNAKSSVYLQLNSLRVDDTAVYFCASTKGGYWGRGTLVTVSS

SEQ ID NO: 31540 - protein, 94 aa, Homo sapiens
GASEFTFNTFGVHWVRQAPGKGLEWVSYIPPTGISTSTFYADSVKGRFTISRDNAKSSVYLQLNSLRVEDTAVYFCASTKGGYWGQGILVTVSS

SEQ ID NO: 31541 - protein, 92 aa, Homo sapiens
AASGITFINYSMNWVRQAPGKGLEWVSYISSSSKTIHYADSVKGRFTISRDNAKNSLNLQMNSLRDEDTAVYYCASTKGGYWGQGTLVTVSS

SEQ ID NO: 31542 - protein, 101 aa, Homo sapiens
TVSGGSISSSSYYWGWIRQPPGKGLDWIESIYYSGSTYHNPSLKSRLTISIDTSKNQFSLRLTSVTAADTAVYYCVRSPIAAAVPYYFDYWGQGTLVTVSS

SEQ ID NO: 31543 - protein, 100 aa, Homo sapiens
VSGGSISRSDYYWGWIRQPPGKGLEWIGGAYYTGKAYYNPSLRSRVTISVDTSKNQFSLKLSSVTAADTALYYCVRSPIAAAVPYYFDYWGQGTLVTVSS

SEQ ID NO: 31544 - protein, 99 aa, Homo sapiens
AASGFIFYNYAMSWVRQSPGRGLEWVSALTGSSEDTYYADSVKGRFTISRDNDKDTLYLQMNSLRDDDTAVYYCAKGSDTGRPYYFDYWGQGTLVTVAS

SEQ ID NO: 31545 - protein, 99 aa, Homo sapiens
AASGFTFSSYAMSWVRQAPGKGLEWVSGITASGGDTWHADSVRGRFTISRDNSKNTLYLQMDSLRGEDTAIYYCAKGSDTGRPYYFDYWGQGSLVTVSS

SEQ ID NO: 31546 - protein, 99 aa, Homo sapiens
AASGFIFYNSAMSWVRQSPGRGLEWVSALTGSSEDTYYADSVKGRFTIYRDNDKDTLYLQMDSLRDDDTAVYYCAKGSDTGRPYYFDYWGQGTLVTVAS

SEQ ID NO: 31547 - protein, 105 aa, Homo sapiens
TQTLTLTCTFSGFSLSTYGVGVGWVRQPPGKALEWLALIYWHDDRRYSPSLKSRLTITKDTSKNQVVLTMTNMDPVDTATYYCAHSNSSSPHDYWGQGTLVTVSS

SEQ ID NO: 31548 - protein, 105 aa, Homo sapiens
TQTLTLTCTFSGFSLSTYGVGVGWIRQSPGKALEWLALIYWHDDKRYSPSLKSRLTITKDTSKNQVVLTMTNMDPVDTATYYCAHSNSSSPHDYWGQGTLVTVSS

SEQ ID NO: 31549 - protein, 105 aa, Homo sapiens; identical to SEQ ID NO: 31547

SEQ ID NO: 31550 - protein, 105 aa, Homo sapiens
TQTLTLTCTFSGFSLSTYGVGVGWIRQPPGKALEWLALIYWNDDKRYNPSLKNRLTITRDTSKNQVVLTLTNMDPVDTATYYCAHSNSSSPHDYWGQGTLVTVSS

SEQ ID NO: 31551 - protein, 105 aa, Homo sapiens
TQTLTLTCTFSGFSLTTTGVGVGWLRQPPGKAPEWLALVYWHDDKRYSPSLKTRLTITKDTSKNEVVLTLTNMAPVDTATYFCAHSNSSSPHDYWGQGVLVTVSS

SEQ ID NO: 31552 - protein, 102 aa, Homo sapiens
EASGFTLGAHWMSWVRQAPGKGLEWVATIKQDGSVKYYVDSVKGRFTISRDNAKNSLYLKMNSLRAEDTALYYCARKMYYYDTGDLGWFDPWGQGLLVNVSS

SEQ ID NO: 31553 - protein, 102 aa, Homo sapiens
VASGFTFSNYWMSWVRQVPGKGPEWVANINQDGSKKYYVDSVKGRFIISRDNAKNSLYLQMNNLGAEDTAVYYCARKMYYYDTGDLGWFDPWGQGTLVNVSS

SEQ ID NO: 31554 - protein, 92 aa, Homo sapiens
AASGFTFSTYGMSWVRQAPGKGLEWVSTVVSGGRTYYADSVKGRFTISRDNSQNTLFLQMNSLRAEDTAVYYCATRGAFDFWGQGTMVTVSS

SEQ ID NO: 31555 - protein, 92 aa, Homo sapiens
VSGFTFTAYAMNWVRQAPGKGLEWVSAIVGSGGATYYADSVKGRFTISRDTSKNTLFLQMDSLRVEDTAVYYCATRGAFDFWGQGTMVTVSS

SEQ ID NO: 31556 - protein, 96 aa, Homo sapiens
TVSGGSISSYFCSWIRQPPGKGLEWIGYIYYGGGTNYNSSLRSRVTISVDTSKKQFSLKLSSVTAADTAVYYCAGGYSSSWYFDYWGQGTLVTVSS

SEQ ID NO: 31557 - protein, 96 aa, Homo sapiens
TVSGGSISSYYWSWIRQPPGKGLEWIGYIYYSGSTNYNPSLKSRVTISVDTSKNQFSLKLSSVPAADTAVYYCAGGYSSSWYFDYWGQGTLVTVSS

SEQ ID NO: 31558 - protein, 96 aa, Homo sapiens
TVSGDSISNYYWSWIRQPPGKGPECIGYIYYSGNTNYNPSLKSRVTISIDASKNQFSLKLNSVTAADTALYYCAGGYSSSWYFDYWGQGTLVTVSS

SEQ ID NO: 31559 - protein, 102 aa, Homo sapiens
TLSGGSVSSYSWSWIRQPPGKGLEWIGFIYYSGRTNYNPSLKSRVTMSVDTSENQFSLKLSSVTAADTAIYYCARDTYCSGGTCFDWYFDLWGRGTLVTVSS

SEQ ID NO: 31560 - protein, 102 aa, Homo sapiens
TVSGGSVSSYSWSWIRQSPGKGLEWIGFIYYSGRTNYNPSLKSRVTMSVDTSENQFSLKLSSVTAADTAVYYCARDTYCSGGTCFDWYFDLWGRGTLVTVSS

SEQ ID NO: 31561 - protein, 102 aa, Homo sapiens
TVSGGSINSYSWSWLRQSPGKGLEWIGFIFYSGRTNYNPSLKSRVTISVDTSENRFSLNLRSVTAADTAIYYCARDTYCSGGTCFDWYFDLWGRGTLVTVSS

SEQ ID NO: 31562 - protein, 102 aa, Homo sapiens
TVSGGSINSYSWSWLRQSPGKGLEWIGFIFYSGRTNYNPSLRSRVTISVDTSENRFSLNLRSVTAADTAIYYCARDTYCSGGTCFDWYFDLWGRGTLVTVSS

SEQ ID NO: 31563 - protein, 90 aa, Homo sapiens
ASGFIFSHSWMSWVRQAPGKGLEWVAHINQDGSHQYYVDSVKGRFTISRDNAKNSLILQMNSLTAEDMAIYYCTSGTESWGQGTPVTVSS

SEQ ID NO: 31564 - protein, 91 aa, Homo sapiens
EASGITLTSSWMSWVRQAPGRGLEWVAHMKPDGSSTYYVDSVKGRFTISKDHTKNSLYLQMASLRVDDTAVYYCTSGTESWGRGTLVTVSS

SEQ ID NO: 31565 - protein, 91 aa, Homo sapiens
ASGFTFSSYWMTWVRQAPGKGLEWVANINEDGSSEYYLDSLRGRFTISRDNAKNSLHLQMNSLRDEDTALYYCASKQGDYWGQGTLVTVSS

SEQ ID NO: 31566 - protein, 92 aa, Homo sapiens
VASGFTFSSYWMSWVRQTPGKGLEWVANINQDGSGKYYVDSVKGRFTISRDNAKNSLYLQMNSLRAEDTALYYCASKQGDYWGQGTLVTVSS

SEQ ID NO: 31567 - protein, 96 aa, Homo sapiens
TTSGFTFSDYAMSWFRQAPGKRLEWVGFIQSKTSDEATEYAASVKGRFVISRDASKRIAYLQMNSLKTEDTAVYYCARGRYQFDFWGQGSLVTVSS

SEQ ID NO: 31568 - protein, 96 aa, Homo sapiens
TVSGFAIGDYVMSWFRQAPGKGLEWVGLITNKPHGETTAYAASVKGRFTISRDDSKSMAYLQMNSLKTEDTAVYYCARGRYQFDFWGRGALVTVSS

SEQ ID NO: 31569 - protein, 96 aa, Homo sapiens
TVSGFAFGDYVMSWFRQAPGKGLEWVGLITNKPHGETTAYAASVKGRFTISRDDSKSMAYLQMNSLKTEDTAVYYCARGRYQFDFWGRGALVTVSS

SEQ ID NO: 31570 - protein, 97 aa, Homo sapiens
ASGYTFINFAMNWVRQAPGQGLEWMGWINTNTGNPTYAQGFTGRFVFSLDTSVSTAYLQISSLKAEDTAVYYCARESGEEMATIDYWGQGTQVTVSS

SEQ ID NO: 31571 - protein, 97 aa, Homo sapiens
AVGYTFSTFGMNWVRQAPGQGLEWMGWINTNTGNPTYAQGFTGRFVFSLDTSVSTAYLQISNLKAEDTAVYYCARESGEEMATIDYWGQGTLVTVSS

SEQ ID NO: 31572 - protein, 96 aa, Homo sapiens
TVSGGSISSRSYYWGWIRQPPGKGLEWIGSIYYSGSTYYNPSLKSRVTISVDTSKNQFSLKLSSVTAADTAVYYCARLITTRPDYWGQGTLVTVSS

SEQ ID NO: 31573 - protein, 96 aa, Homo sapiens
TVSGGSISSSSYYWGWIRQPPGKGLEWIGSIYYSGTTYYNPSLKSRVTMSVDTSKNYFSLKLTSVTATDTAVYYCARLITTRPDYWGQGTLVTVSS

SEQ ID NO: 31574 - protein, 91 aa, Homo sapiens
VGSGFTFGSYSMNWVRQAPGKGLEWVSYISSSSSTIYYADSVKGRFTISRDNAKNSLYLQMNSLRDEDTAVYYCARKGDLWGRGTLVTVSS

SEQ ID NO: 31575 - protein, 91 aa, Homo sapiens
AASGFTLSSYSMNWVRQAPGKGLEWVSYISSSSSTIYYADSVKGRFTISRDNAKNSLYLQMNSLRDEDTAVYYCARKGDLWGRGTLVTVSS

SEQ ID NO: 31576 - protein, 91 aa, Homo sapiens
AASGFTLSTFSMNWVRQAPGKGLEWVSYISSSGSTIYYADSVKGRFTISRDNARNSLYLQMNSLRDEDTAVYYCARKGDLWGRGTLVTVSS

SEQ ID NO: 31577 - protein, 91 aa, Homo sapiens; identical to SEQ ID NO: 31576

SEQ ID NO: 31578 - protein, 91 aa, Homo sapiens
AASGFTLSSYSMNWVRQAPGKGLEWISYISSSSSTIYYADSVKGRFTISRDSAKNSLYLQMNNLRDEDTAVYYCARKGDLWGRGTLVTVSS

SEQ ID NO: 31579 - protein, 91 aa, Homo sapiens
AASGFTLNSYSMNWVRQAPGKGLEWVSYISSSGSTIYYADSVKGRFTISRDNAKNSLYLQMNSLRDEDTAVYYCARKGDLWGRGTLVTVSS

SEQ ID NO: 31580 - protein, 93 aa, Homo sapiens
AASGFTFSSFWMTWVRQAPGKGLEWVANIKRDGSEKYYVDSVKGRFTISRDNAKNSLYLQMNSLRVEDTALYYCARARGAEYWGQGTLVTVSS

SEQ ID NO: 31581 - protein, 93 aa, Homo sapiens
AASGFTYSNFWMTWVRQAPGKGLEWVANIKQDGSEKYYVDSVKGRFTISRDNAKNSLYLQMNSLRAEDTAVYYCARARGAEYWGQGTLVTVSS

SEQ ID NO: 31582 - protein, 102 aa, Homo sapiens
TVSGGAISGYYWSWIRQPPGKGLEWIGYVYYSGSTNYNPSLKSRVTMSVDTSKNQFSLKMNSVTAADTAVYYCARDRYCSGGTCFDWYFDLWGRGTLVTVSS

SEQ ID NO: 31583 - protein, 102 aa, Homo sapiens
TVSGGAISGYYWSWIRQPPGKGLEWIGYIYYSGNTNYNPSLKSRVTMSVDTSKNQFSLKMNSVTAADTAVYYCARDRYCSGGTCFDWYFDLWGRGTLVTVSS

SEQ ID NO: 31584 - protein, 102 aa, Homo sapiens
TVSGGSISGYSWSWVRQSPGKGLEWIGFIYYSGRTNYNPSLKSRVTMSADTSNNQFSLKLTSVTAADTAVYYCARDRYCSGGTCFDWYFDLWGRGTLVTVSS

SEQ ID NO: 31585 - protein, 102 aa, Homo sapiens; identical to SEQ ID NO: 31584

SEQ ID NO: 31586 - protein, 95 aa, Homo sapiens
SGYTFGSYDINWVRQAPGQGPEWMGWMNPDSGNTGYALPFQGRLTMTRDTSIATAYMELSSLESADTAVYYCTRAVRHQLLSDYWGQGTLVTVSS

SEQ ID NO: 31587 - protein, 95 aa, Homo sapiens
ASGYTFITYDITWVRQATGQGLEWMGWMNPYSGDTGYAQKFQGRVTMTRNTSISTAYMELVSLRHADTAVYYCTRAVRHQLLSDYWGQGTLVTVS

SEQ ID NO: 31588 - protein, 96 aa, Homo sapiens
AASGFTFTKYVINWVRRAPGKGLEWVSDINGSGDDTNYADSVKGRFTISRDNSKNTVYLQMNSLRADDTAVYYCVKGGWGSVVDYWGQGTRVTVSS

SEQ ID NO: 31589 - protein, 96 aa, Homo sapiens; identical to SEQ ID NO: 31588

SEQ ID NO: 31590 - protein, 96 aa, Homo sapiens
AASGFTFTKYVISWVRRAPGKGLEWVSDINGSGDDTNYADSVKGRFTISRDNSKNTVYLQMNSLRADDTAVYYCVKGGWGSVVDYWGQGTRVTVSS

SEQ ID NO: 31591 - protein, 96 aa, Homo sapiens
AASGFTFTKYVINWVRRAPGKGLEWVSDINGSGDDTNYADSVKDRFTISRDNSKNTVYLQMNSLRADDTAVYYCVKGGWGSVVDYWGQGTRVTVSS

SEQ ID NO: 31592 - protein, 95 aa, Homo sapiens
ASGFTFTKYVINWVRRAPGKGLEWVSDINGSGDDTNYADSVKGRFTISRDNSKNTVYLQMNSLRADDTAVYYCVKGGWGSVVDYWGQGTRVTVSS

SEQ ID NO: 31593 - protein, 96 aa, Homo sapiens
AASGFTFTKYVINWVRRAPGKGLEWVSDINGSGDDTNYADSMKGRFTISRDNSKNTVYLQMNSLRADDTAVYYCVKGGWGSVVDYWGQGTRVTVSS

SEQ ID NO: 31594 - protein, 96 aa, Homo sapiens
AVSGFTFSSYAMSWVRQAPGKGLEWVSAIYSGGTGTYYADSVKGRFTISRDNSKNTVYLQMNSLRAEDTALYYCVKGGWGSVVDYWGQGTLVTVSS

SEQ ID NO: 31595 - protein, 93 aa, Homo sapiens
AASGFTFSTYEMNWVRQAPGKGLEWVSYISYSGSLIYYADSVKGRFTISRDNAKNSLYLQMNSLRAEDTAVYYCARDAYSDYWGQGTLVTVSS

SEQ ID NO: 31596 - protein, 93 aa, Homo sapiens
AASGFSFSTYEMNWVRQAPGKGLEWVSHISYSGITILYADSVKGRFTISRDNAKNSLYLQMNSLRAEDTAVYYCARDAYSDYWGQGTLVTVSS

SEQ ID NO: 31597 - protein, 99 aa, Homo sapiens
KGSGYSFSTYWIAWVRQMPGKGLEWMGIIYPGDSDARYSPAFKGQVTFSADKSISTAYLQWSSLKASDSAIYYCARGDRPMIYFGMDVWGQGTAVTVSS

SEQ ID NO: 31598 - protein, 99 aa, Homo sapiens
KGSGYSFTTYWIAWVRQMPGKGLEWMGIIYPGDSDARYSPAFKGQVTFSADKSISTAYLQWSSLKATDTAIYYCARGDRPMIYFGMDVWGQGTAVTVSS

SEQ ID NO: 31599 - protein, 99 aa, Homo sapiens; identical to SEQ ID NO: 31597

SEQ ID NO: 31600 - protein, 99 aa, Homo sapiens; identical to SEQ ID NO: 31598

SEQ ID NO: 31601 - protein, 99 aa, Homo sapiens
KGSGYIFTTYWIAWVRQMPDKGLEWMGIIYPGDSDTRYSPSFRGLVTMSVDKSVNTTYLQWSSLRASDTATYYCARGDRPMIYFGMDVWGQGTTVTVSS

SEQ ID NO: 31602 - protein, 93 aa, Homo sapiens
ASGYTFTTLDINWVRQATGQGLEWMGWMNPNSGFSGTAQKFQGRVTMTKITSISTAYMELSGLTSEDTAVYYCARARGDLDYWGQGTLVTVSS

SEQ ID NO: 31603 - protein, 92 aa, Homo sapiens
ASGYTFISYEINWVRQATGQGLEWMGWMNPNSGNTGYAQKFQGRVTMTRNTSISTAYMELSSLRSDDTAVYYCARARGDLDYWGQGTLVTVS

SEQ ID NO: 31604 - protein, 95 aa, Homo sapiens
AVNGGSFSGYYWSWIRQPPGKGLEWIGEIIHSGSANYNPSLKSRVTISVDTSKNQFSLKLSSVTAADTAVYYCARIYDPRGFDPWGQGTLVIVSS

SEQ ID NO: 31605 - protein, 95 aa, Homo sapiens
AVYSGSFSDYYWSWIRQPPGKGLEWIGEIIHSGTTNYNPSLKSRVTISVDTSKNQFSLKLNSLTAADTAVYYCARIYDPRGFDPWGQGTLVTVSS

SEQ ID NO: 31606 - protein, 96 aa, Homo sapiens
ASGFTFSSYWMSWVRQAPGKGLEWVANIKQDGSEKYYADGVKGRFTISRDNAKNSLYLQMNSLRAEDTAVYYCARAGTTTWVQDFWGQGTLVTVSS

SEQ ID NO: 31607 - protein, 96 aa, Homo sapiens
ASGFTFSGHWMSWVRQAPGQGLEWVANIKQDGSEKYYLDAVKGRFTISRDNAKNSLYLQMNSLRVEDTAFYYCARAGTTTWVQDFWGQGTLVTVSS

SEQ ID NO: 31608 - protein, 97 aa, Homo sapiens
AASGFTFTTYWMSWVRQAPGKGLEWVANIRQDGSEKYHVDSVKGRFTISRDNSKNSLYLQMNFLRVEDTAVYYCARAGTTTWVQDFWGRGTLVTVSS

SEQ ID NO: 31609 - protein, 91 aa, Homo sapiens
AASGFSFSSFEMNWVRQPPGKGLESISHISSGFTIYYAESVKGRFTISRDNAKNSLYLQMNSLRAEDTAVYYCVRGWGAHWGQGTLVTVSS

SEQ ID NO: 31610 - protein, 92 aa, Homo sapiens
ATSGFTFSVDEMSWVRQAPGKGLEWVSFISSGGGSIYYADYVEGRFTISRDNAKKSLYLQMNSLTNEDTGLYYCVRGWGAHWGQGALVTVSS

SEQ ID NO: 31611 - protein, 94 aa, Homo sapiens
AASGFAVSSNYMSWVRQAPGKGLEWVSVIYSDASTYYADSVKGRFTISRHTSKNTLYLQMNSLRPEDTAVYYCARVVSDAFDVWGQGTMVTVSS

SEQ ID NO: 31612 - protein, 94 aa, Homo sapiens
AASGFNVGSNYMSWVRQAPGKGLEWVSVIYSGGSTHYADSVKGRFTISGDNSKNTLYLQMNSLRVEDTAVYYCARVVSDAFDVWGQGTMVTVSS

SEQ ID NO: 31613 - protein, 101 aa, Homo sapiens
TVSGGSISVGGYFWSWVRQHPGEGLEWIGYISYSGSTYYNPSLESRVSISVDTSKNQFSLKLTSVTAADTAVYYCARDRGGREDYYYMDVWGKGTTVTVSS

SEQ ID NO: 31614 - protein, 101 aa, Homo sapiens
TVSGGSLNSGGYYWSWVRQLPGRGLEWIGNIYYSGSTNYNPSLKSRVTISVDTSKSQFSLRLSSVTAADTAIYYCARDRGGREDYYYMDVWGKGTTVAVSS

SEQ ID NO: 31615 - protein, 101 aa, Homo sapiens
TVSGGSLNNGGYYWSWVRQLPGRGLEWIGNIYYSGSTNYNPSLKSRVTISVDTSKSQFSLRLSSVTAADTAIYYCARDRGGREDYYYMDVWGKGTTVAVSS

SEQ ID NO: 31616 - protein, 91 aa, Homo sapiens
AASGFTFSNNWMSWVRQAPGKGLEWVANVNQDGSEKNYVDSVKGRFTISRDNAKNSLYLQMNSLRVEDTAVYYCATDLAYWGQGTLVTVSS

SEQ ID NO: 31617 - protein, 91 aa, Homo sapiens
AASGFTFSAYWMAWVRQAPGKGLEWVANIKQDGSEKYYVDSVKGRFTISRDNAKKSLYLQMNSLRVEDTAVYYCATDLAYWGQGTLVTVSS

SEQ ID NO: 31618 - protein, 95 aa, Homo sapiens
ASGYTFKTYYIHWVRQAPGQGLEWMGIINPSGGSTSFAQKFQGGITMTRDTSTNTVYMELSSLRSEDTALYYCARAGILSASDYWGQGALVTVSS

SEQ ID NO: 31619 - protein, 95 aa, Homo sapiens
ASGYTFKTYYIHWVRQAPGQGLEWMGIINPSGGSTSFAQKFQGRITMTRDTSTNTVYMELSSLRSEDTALYYCARAGILSASDYWGQGALVTVSS

SEQ ID NO: 31620 - protein, 105 aa, Homo sapiens
AASGFTFSDYYMDWVRQAPGKGLEWVGRRRNKVNSYRTEYAASVKGRFTISRDDSNNLLYLQMNSLKTEDTAVYYCARDVRAVPGNYFYSGLDVWGQGTTVIVSS

SEQ ID NO: 31621 - protein, 105 aa, Homo sapiens
AASGFTFSDHYMDWVRQAPGKGLEWVGRARNKADSYTTEYAASVKGRFTISRDDSKNSLYLQMNSLKTEDTAVYYCARDVRAVPGNYFYSGLDVWGQGTTVTVSS

SEQ ID NO: 31622 - protein, 98 aa, Homo sapiens
AASGFTFSNYVMSWVRQAPGKGLEWVSTIGGGGGTTYYADSVKGRFTISRDNSKNTLYLQMNSLRAEDTAVYYCANRGLRGAGGMDVWGQGTTVTVSS

SEQ ID NO: 31623 - protein, 98 aa, Homo sapiens
AASGFAFSNSGMSWVRQAPGKGLEWVSTFSGRGGNTYYADSVKGRFTISRDNSKSTLYLQMNSLRAEDTAVYYCANRGLRGAGGMDVWGQGTTVTVSS

SEQ ID NO: 31624 - protein, 97 aa, Homo sapiens
ISGDNVFSKSIAWNWIRQSPSRGLEWLGRTYYDSKWFNDYAVSFKSRMTINLDTSNNHLSLQLNSVAPEDTAVYFCARGHNSAFDYWGQGILVTVSS

SEQ ID NO: 31625 - protein, 97 aa, Homo sapiens
ISGDSMSRMDVAWNWIRQSPSRGLEWLGRTYYRSKWYNDYAESVKSRISITPDTSKSQFSLQLNSVTPEETAVYYCARGHNSAFDYWGQGTLVSVSS

SEQ ID NO: 31626 - protein, 97 aa, Homo sapiens
ASGYTFTSYGINWVRQAPGQGLEWMGWISAYNGNTHYAQKLQGRVTMTTDTSTSTAYMDLKSLRSDDTAVYYCARGRDGYNSSFDYWGQGTLVTVSS

SEQ ID NO: 31627 - protein, 97 aa, Homo sapiens
ASGYTFTSYGINWVRQAPGQGLEWMGWISAYNGNTNYAQKLQDRVTMTTDTSTRTAYLDLRSLRFDDTALYYCARGRDGYNSSFDYWGQGTLVTVSS

SEQ ID NO: 31628 - protein, 97 aa, Homo sapiens
AYGYTFSSNAMHWVRQAPGQRLEWMGWINTGNGNTKYSQKFQGRVTITSDTSASTAYMDLSSLTSEDTAVYYCAARPGIVVAGLDYWGQGTLVTVSS

SEQ ID NO: 31629 - protein, 97 aa, Homo sapiens
ASGYTFIDYAMHWVRQAPGQRLEWMGWINAGNGDTKYSQKFQDRVTITRDTSASTVYMQLSSLRSEDTAVYYCAARPGIVVAGLDYWGQGALVTVCS

SEQ ID NO: 31630 - protein, 96 aa, Homo sapiens
SGYTFTNYAIHWVRQAPGQRFEWMGWINPGNGDIKFSQNFQGRVTITSDTSASTAYMELSSLTSEDTAVYYCAARPGIVVAGLDYWGQGTLVTVSS

SEQ ID NO: 31631 - protein, 94 aa, Homo sapiens
AASGFTFSNHWMHWVRQAPGKGLVWVSHINSDGSSTSYAYSVKGRFTISRNNAKNTLYLQMNSLRAEDTAVYFCARGWYSSDYWGQGTLVTVSS

SEQ ID NO: 31632 - protein, 94 aa, Homo sapiens
AASGFSFSSYWMHWVRQAPGKGLVWVSRLNSDGSSTSYADSVKGRFTISRDNAKNTLYLQMNSLRAEDTAVYYCARGWYSSDYWGQGTLVTVSS

SEQ ID NO: 31633 - protein, 92 aa, Homo sapiens
TVSGFSLSNYYWTWIRQPPGKGLEWIGYIHSSGSTNYNPSLKSRVTISVDTSKNQFSLKLSSVTAADTAFYYCARGNGYIYYWGQGTLVTVS

SEQ ID NO: 31634 - protein, 93 aa, Homo sapiens
TVSGGSISSFYWTWIRQPPGKGLEWIGYIYYTGNTNYNPSLKSRVTMSLDTSKNQFSLKLSSVTAADTAVYYCARGNGYIYYWGQGTLVTVSS

SEQ ID NO: 31635 - protein, 99 aa, Homo sapiens
AASGFTFSSYAMSWVRQAPGRGLEWVSTINDGGGSTFYADSVKGRFTISRDNPKNTLYLQMNSLKAEDTAVYYCAKDRGDSGYEIFDYWGRGTLVTVSS

SEQ ID NO: 31636 - protein, 99 aa, Homo sapiens
AASGFTFGNYAMTWVRQAPGKGLEWVATISINGVSSYYPASVKGRFTISRDNSKDTLFLQMNSLRAEDTATYFCAKDRGDSGYEIFDYWGHGTLVTVSS

SEQ ID NO: 31637 - protein, 96 aa, Homo sapiens
ASGYTFTTYLIHWLRQAPGQGLEWLGRIGPGSDVTHYSHYFQGRVTMTSDTSTSTVYMELTSLMSDDTAVYFCAREKEGTTYFDYWGQGTLVTVSS

SEQ ID NO: 31638 - protein, 95 aa, Homo sapiens
SGYTFTNYYIHWVRQAPGQGLEWMGIINPNAGNTRYAQKFQGRVTMTRDTSTTTVYMDLSSLRSEDTAVYFCAREKEGTTYFDYWGQGTLVTVSS

SEQ ID NO: 31639 - protein, 90 aa, Homo sapiens
ASGFTFSSYGMNWVRQAPGKGLEWVANIKHDGSLKYYVDSVKGRFTISRDNAQNSLYLQMNSLRVEDTAVYYCARSTDYWGRGTLVTVSS

SEQ ID NO: 31640 - protein, 91 aa, Homo sapiens
AASGFTFTTYWMSWVRQAPGKGLEWVANIKPDGSDKFYVGSAKGRFTISRDNAKNSLYLQMNSLRAEDTAIYYCARSTDYWGQGILVTVSS

SEQ ID NO: 31641 - protein, 95 aa, Homo sapiens
AASGLTLSDYFMTWIRQAPGKGLEWVSYIGDRGTPIFYSDSVKGRFTISRDNAKNSLYLQMHSLRADDTAVYYCTTLSSSSIAYWGQGTLLTVSS

SEQ ID NO: 31642 - protein, 95 aa, Homo sapiens
AAPGLSFSDYFMTWIRQAPGKGLEWVSYISNIDSTIYYADSVRGRFTISRDNAKKSLYLQMNSLRAEDTAMYYCTTLSSSSIAYWGRGTLVTVSS

SEQ ID NO: 31643 - protein, 92 aa, Homo sapiens
ASEFTFSNYWMTWVRQAPGKGLEWVANIKQDGSEKYYVDSVKGRFTISRDNAKNSLYLEMNSLRADDTAVYYCAGGRNSAYWGQGTLVTVSS

SEQ ID NO: 31644 - protein, 93 aa, Homo sapiens
AASGFTFSTYWMTWVRQAPGKGLDWVANIKQDGSEKYYVDSVKGRFTISRDNAKNSLYLQMNSLRAEDTAVYYCAGGRNSAYWGQGTRVTVSS

SEQ ID NO: 31645 - protein, 93 aa, Homo sapiens; identical to SEQ ID NO: 31644

SEQ ID NO: 31646 - protein, 92 aa, Homo sapiens
AASGFTFSSYGMHWVRQAPGKGLEWVAVISYDGSNKYYADSVKGRFTISRDNSKNTLYLQMNSLRAEDTAVYYCSRRGFDYWGQGTLVTVSS

SEQ ID NO: 31647 - protein, 92 aa, Homo sapiens
AGSGFTFSSYGMHWFRQAPGKGPEWVAAISSDGRNKDYLDSVWGRFSISRDNSKNIHYLQMNNLRAEDTALYYCSRRGFDYWGQGTLVTVSS

SEQ ID NO: 31648 - protein, 94 aa, Homo sapiens
TVSGGSFSSGSYYWNWIRQPAGKGLEWIGRIVTSGSTDYNPSLKSRVTISVDTSKNQFSLKLSSVTPADTAVYYCARSGAFDIWGQGTMVTVSS

SEQ ID NO: 31649 - protein, 93 aa, Homo sapiens
TVSGGSVNRGYYWNWIRQPPEKGLEWIGYIYNSGNTSYNPSLKSRVTISVDTSKNQFSLKLTSVTTADTAVYYCARSGAFDIWGQGTMVTVSS

SEQ ID NO: 31650 - protein, 95 aa, Homo sapiens
SVSGDSITTYYWSWIRQPPGKGLEWIGYITDSGSTNYNPSLERRVTISKDTSKNQFHLKLTSVTAADTAVYYCAREGPANWFDPWGQGTLVIVSS

SEQ ID NO: 31651 - protein, 95 aa, Homo sapiens
TVSGGSISTYYWGWIRQPPGKGLEWIGYITDSGSTNYNPSLKSRVIISKDMSKNQFSLRLNSVTAADTAVYYCAREGPANWFDPWGRGTLVTVSS

SEQ ID NO: 31652 - protein, 94 aa, Homo sapiens
VSGGSISSFYWSWIRQPPGKGLEWIGYIYYSGVTNYNPSFKSRVTMSIDTSNNQFSLKLSFVTAADTAVYYCAREGPANWFDPWGQGALVTVSS

SEQ ID NO: 31653 - protein, 93 aa, Homo sapiens
AASGFIFSSNWMTWVRQAPGKGLEWVANIKQDGSEKYYVDSVKGRFTISRDNAKNSLYLQMNILRADDTAVYYCARGLAAAGWGQGTLVTVSS

SEQ ID NO: 31654 - protein, 93 aa, Homo sapiens
AGSGFTYSSNWMNWVRQAPGKGLEWVANINQDGSEKYYVDSVKGRFTISRDNAKNSLYLQMNSLRAEDTAVYYCARGLAAAGWGQGTLVTVSS

SEQ ID NO: 31655 - protein, 93 aa, Homo sapiens
AASEFTFNSYWMSWVRQAPGKGLEWVANMKQDGSEIYYVDSVKGRFTISRDNAKNSLYLQMNSLRAEDTAVYYCARGRTTDVWGQGTTVSVSS

SEQ ID NO: 31656 - protein, 93 aa, Homo sapiens
GTSGFTFSSYWMTWVRQGPGKRLECVASIKQDGSERNYVDSVKGRFTISRDNANNSLYLQMNSLSTEDTAVYYCARGRTTDVWGQGTTVTVSS

SEQ ID NO: 31657 - protein, 93 aa, Homo sapiens
GTSGFTFSSYWMTWVRQGPGKRLECVASIRQDAIERNYVDSVRGRFTISRDNAKNSLYLQMNSLRSEDTAVYYCARGRTTDVWGQGTTVTVSS

SEQ ID NO: 31658 - protein, 97 aa, Homo sapiens
TVSGVSISSSSYYWAWIRQPPGKGLEWIGSIYYSGRTYYNPSLKSRVTISVDTSKNQLSLKLSSVTAADTTVYYCARHVSHTATDYWGQGTLVTVSS

SEQ ID NO: 31659 - protein, 97 aa, Homo sapiens
TVSGVSISSSSYYWGWIRQPPGKGLEWIGSIYYGGSTYYNPSLKSRVTISVDTSKNQFSLKLSSVTAADTAVYYCARHVSHTATDYWGQGTLVTVSS

SEQ ID NO: 31660 - protein, 94 aa, Homo sapiens
AASGFTFSSFAMRWVRQAPGRGLEWVSAIGAGGVSTKYADSVKGRFTISRDNSKNTVYLQMNSLRAEDTAVYYCARSNNGFDYWGQGTLVTVSS

SEQ ID NO: 31661 - protein, 94 aa, Homo sapiens
ESSGFIFSNYAMNWVRQTPGRGLEWVSTITISGGITYYADSVKGRFTVSRDNSKNTLNLQMNSLRAEDTAVYYCARSNNGFDYWGQGSLVSVSS

SEQ ID NO: 31662 - protein, 93 aa, Homo sapiens
AASGFTFTSYVMIWVRQAPGKGLEWVSGITGSGGNTYYANSVKGRFTISRDNSRNTLYLQMNSLTADDTAVYYCAKGLTIDYWGQGTLVTVSS

SEQ ID NO: 31663 - protein, 92 aa, Homo sapiens
ASGFTFTTSAMTWVRQAPGKGLEWVAAISGTSGSAYYSDSVKGRFTISRDNSKNTLYLQMNYLRVDDSAVYYCAKGLTIDYWGQGTLVTVSS

SEQ ID NO: 31664 - protein, 92 aa, Homo sapiens
ASGFTFTTSAMTWVRQAPGKGLEWVAAIGGTSGGAYYSDSVKGRFTISRDNSKNTLSLQMNYLRVDDSAVYYCAKGLTIDYWGRGTLVTVSS

SEQ ID NO: 31665 - protein, 92 aa, Homo sapiens
ASGFTFSTSAMTWVRQAPGKGLEWVAAIGTSSGSAYYSDSVKGRFTISRDNSKNTLSLQMNYLRVDDSAVYYCAKGLTIDYWGQGTLVTVSS

SEQ ID NO: 31666 - protein, 95 aa, Homo sapiens
TVSGGSISGYYWSWIRQPPGKGLEWIGYIFYSGSTNYNPSLKSRVTISVDTSKNQFSLKMNSVTAADTAVYYCARGGYSYGLDPWGQGTLVTVSS

SEQ ID NO: 31667 - protein, 95 aa, Homo sapiens
TVSGGSISNYYWSWIRQPPGKGLEWIGYIYYTGSTNYNPSLKSRVTISVDTSKNQFSLKLISVTAADTAVYYCARGGYSYGLDPWGQGSLVTVSS

SEQ ID NO: 31668 - protein, 99 aa, Homo sapiens
AASGFSFENYAMHWVRQAPGKGLEWVAGICVNSGCLDYADSVKGRFTISRDNAKNTLYLQMNSLRAEDTALYYCAKELSPAGYSPLDYWGQGSLVTVSS

SEQ ID NO: 31669 - protein, 98 aa, Homo sapiens
AASGFIFGDYAMHWVRQAPGKGPEWVAGICVGGGCMGYADSVRGRFTISRDDGQKSLYLQMNSLRPDDTAFYYCAKELSPAGYSPLDYWGQGTLVTVS

SEQ ID NO: 31670 - protein, 96 aa, Homo sapiens
ISGDSVSSNSAAWNWIRQSPSRGLEWLGRTYYRSKWFSVYAVSVKSRITITPDTSKNQFSLQLKSVTPEDTAVYWCARGPGHFQHWGQGTLVTVSS

SEQ ID NO: 31671 - protein, 96 aa, Homo sapiens
ISGDSVSSNSAAWNWVRQSPSRGLEWLGRTYYRSKWYSVYALSFKSRISIKADTSKNQFSLQLNSVTPEDTGVYYCARGPGHFQHWGQGTLVTVSS

SEQ ID NO: 31672 - protein, 96 aa, Homo sapiens; identical to SEQ ID NO: 31670

SEQ ID NO: 31673 - protein, 94 aa, Homo sapiens
AASGFTFSNYAMSWVRQAPGKGLEWVSFISSSGGNTFYADSVKGRFTISRDNSKNTLYLEMNILRAEDTALYYCARGRSAFDIWGQGTMVTVSS

SEQ ID NO: 31674 - protein, 94 aa, Homo sapiens
AASGFTFTSYAMSWVRQAPEKGLEWVSSISGSGGSTFYADSVKGRFTISRDNSKSMLYLQMNSLRADDTAVYYCARGRSAFDIWGQGTMVTVSS

SEQ ID NO: 31675 - protein, 95 aa, Homo sapiens
VGSGFSFSDHYIDWLRQAPGKGLECIGRIRNKGKSYTTDYAASVKGRFTLSRDDSKNSVYLQMNSLKTEDTAVYYCADVGSYLPWGQGTLVTVSS

SEQ ID NO: 31676 - protein, 95 aa, Homo sapiens
VASGFSFSDHYMDWVRQAPGKGLQWVARIKNKPRSYTTGYAASVKDRFSISRDDSQNSVYLQMNSLRPEDSAVYYCADVGSYLPWGQGTLVTVSS

SEQ ID NO: 31677 - protein, 93 aa, Homo sapiens
VGSGFTFSDHYIDWVRQAPGKGLEFIGRIRNKSYTTDYAASVKGRFTLSRDDSKNSVYLQMNSLKTEDTAVYYCADVGSYLPWGQGALVTVSS

SEQ ID NO: 31678 - protein, 92 aa, Homo sapiens
VASGLTFSSHWMGWVRQAPGKGLEWVAAIKEDGSEKYYVDSVKGRVTISRDNAKNSLYLLIDRPRAEDTAIYYCARGRGASWGQGTLVTVSS

SEQ ID NO: 31679 - protein, 92 aa, Homo sapiens
AASGFTFGTYWMSWVRQAPGRGLEWVANIKEDGSEKYYVDSVKGRFTISRDNAKSSLFLQMNSLRAEDTAVYYCARGRGASWGQGTLVTVSS

SEQ ID NO: 31680 - protein, 96 aa, Homo sapiens
AASGFTVSSNYMTWVRQAPGKGLEWVSVIYSGGSTYYADSVKGRFTISRDNSKNTLFLQMNSLRVEDTAIYFCARDSVAVAGTDYWGQGTLVTVSS

SEQ ID NO: 31681 - protein, 96 aa, Homo sapiens
AASGFTASSNYMTWVRQAPGKGLEWVSVIYTDGSTYYADSVKGRFIISRDGSKNTLYLQMNSLRAEDTAVYYCARDSVAVAGTDYWGQGTLVTVSS

SEQ ID NO: 31682 - protein, 96 aa, Homo sapiens
AASGFTVSSNYMSWVRQAPGKGLEWVSVIYSGGSTYYADSVKGRFTISRDNSRNTLYLQMNSLRGEDTAVYYCARDSVAVAGTDYWGQGALVTVSS

SEQ ID NO: 31683 - protein, 97 aa, Homo sapiens
TVSGGSISSSDYYWGWIRQPPRKGLEWIGTISYSGNTYYNPSLKSRVTISVDASKNQFSLKLSSVTAADTAVYYCARRGDSHGLFDYWGQGTLVTVS

SEQ ID NO: 31684 - protein, 98 aa, Homo sapiens
TVSGGSISSSDYYWGWIRQPPGKGLEWIGSIYYSGRTYYNPSLKSRVTIYVDTSKNQFSLKLSSVTATDTAVYYCARRGDSHGLFDYWGQGTLVTVSS

SEQ ID NO: 31685 - protein, 92 aa, Homo sapiens
AASGFTLSIYPMSWVRQAPGKGLEWVSVISNGDTTTSYADSVKGRFTISRDDSQNTLYLQMNSLRAEDTALYYCARGWGANWGQGTLVTVSS

SEQ ID NO: 31686 - protein, 92 aa, Homo sapiens
AASGFTFSNYDMTWVRQAPGKGLECVSYISYSGGSTNYADSVKGRFTISRDNSKNTLYLQMNSLRAEDTAIYYCARGWGANWGQGIPVTVSS

SEQ ID NO: 31687 - protein, 101 aa, Homo sapiens
AASGFTFGDYGMSWVRQAPGKGLEWVSGINWNGGSTGYADSVKGRFTISRDNAKNSLYLQMNGLRAEDTALYYCARDYYASGTYYLPSDYWGQGTLVTVSS

SEQ ID NO: 31688 - protein, 101 aa, Homo sapiens
AASGFNFDDFGMTWVRQVPGKGLEWVASISSTGGRIGYADSVKGRFTISRDNAEDSLYLQMNSLRAEDTALYHCARDYYASGTYYLPSDYWGQGTLVTVSS

SEQ ID NO: 31689 - protein, 101 aa, Homo sapiens
AASGFSFDDFGMSWVRQVPGKGLEWVSGINSNGGRTGYADSVKGRFTISRDNAKNSLFLQMNSLRAEDTALYHCARDYYASGTYYLPSDYWGQGTLVTVSS

SEQ ID NO: 31690 - protein, 100 aa, Homo sapiens
AASGFTFSSSPMHWVRQAPGKGLDWLAVISPDGTSQDYADSVRGRFTISRDNSNNALYLQMNSLASEETGVYYCVREGRSSGRAGCFDYWGQGSLVTVSS

SEQ ID NO: 31691 - protein, 100 aa, Homo sapiens
AVSGFTFSTSVLHWLRQAPGKGLEWVAGISVDGSAQHYPDSLRGRFTISRDNSKNTLFLQMNSLRNEDTAVYYCVREGRSSGRAGCFDYWGQGALVTVSS

SEQ ID NO: 31692 - protein, 95 aa, Homo sapiens
AASGFTFSDSGMHWVRQAPGKGLEWVGRIRSKTNSYATAYAASVNGRFTISRDDSKSTAYLQMNSLKTEDTAVYYCTTPAAFNIWGQGTMVTVSS

SEQ ID NO: 31693 - protein, 95 aa, Homo sapiens
ATSGFIFSDSGMHWVRQTSGKGLEWVGRIRSKANYYATTYASSVKGRFTISRDDSKNTAYLQMNSLKIEDTAVYYCTTPAAFNIWGQGTMVTVSS

SEQ ID NO: 31694 - protein, 95 aa, Homo sapiens
AASGLTFSDSGMHWVRQASGKGLEWVGRIRNKANSHATEYSASVKGRFTISRDDSKNMAYLQMNSLKTEDTAVYYCTTPAAFNIWGQGTVVVVSS

SEQ ID NO: 31695 - protein, 95 aa, Homo sapiens
AASGLDFSGSGMHWVRQPSGKGLEWVGRIRNKINGYATEYSASAKGRFTISRDDSQNTAYLQMDSLKTEDTAVYYCTTPAAFNIWGQGTRVTVSS

SEQ ID NO: 31696 - protein, 95 aa, Homo sapiens
ASGYTFRIYGVHWVRQAPGQRLEWMGWINPGDGNTRDSQKFQGRVTITRDTSASTVYMDLSSLTSEDTAVYYCARAGSAWSIDYWGQGTLVTVSS

SEQ ID NO: 31697 - protein, 95 aa, Homo sapiens
ASGYTFTSYSLQWVRQAPGQRLEWMGWINAGNGNTKYSRKFQGRITITRDTSASTAYMELSSLTSEDTAVYYCARAGSAWSIDYWGQGTLVTVSS

SEQ ID NO: 31698 - protein, 96 aa, Homo sapiens
AASGFTFSAYWMTWFRQAPGKGLEWVANIKQDGSEKYYVDSVKGRFTISRDNAKNSLYLQVNSLRAEDTAVYYCARDDMRNTVDYWGQGTLVTVSS

SEQ ID NO: 31699 - protein, 96 aa, Homo sapiens
AASGFPFSSYWLTWFRQAPGKGLEWVANMNKDGSEKYYVDSVKGRFTISRDNAKNSLYLQMNDLRDEDTATYYCARDDMRNTVDYWGQGTLVTVSS

SEQ ID NO: 31700 - protein, 101 aa, Homo sapiens
AASGFTFTKAWMSWVRLAPGKGPEWVARIKSKSDGGTTDYAAPVKGRFTISRDDSQNTLFLEMNNLKIEDTAVYYCTTDGGLAPRPLFDYWGRGTLVTVSS

SEQ ID NO: 31701 - protein, 101 aa, Homo sapiens
AASGFTFTKAWMSWVRLAPGKGPEWVARIKSKRDGGKPDYAAAVKGRFTISRDDSQNTLFLEMNNLKIEDTAVYYCTTDGGLAPRPLFDYWGRGTLVTVSS

SEQ ID NO: 31702 - protein, 101 aa, Homo sapiens
AASGFTFTKAWMSWVRLAPGKGPEWVARIKNKNNGGTTDYAAPVKGRFTISRDDSQNTLFLEMNNLKVEDTAVYYCTTDGGLAPRPLFDYWGRGTLVTVSS

SEQ ID NO: 31703 - protein, 101 aa, Homo sapiens
ATSGFPFNDAWMGWVRQAPGKGLEWVGRIKSKSNGGTTDYAAPVRGRFTISRDDSRNTVYLQMNSLKTEDTAMYFCTTDGGLAPRPLFDYWGRGTLVTVSS

SEQ ID NO: 31704 - protein, 101 aa, Homo sapiens
ATSGFPFNDAWMGWVRQAPGKGLEWVGRIKGKSNGGTTDYAAPVRGRFTISRDDSRNTVYLQMNSLKTEDTAMYFCTTDGGLAPRPLFDYWGRGTLVTVSS

SEQ ID NO: 31705 - protein, 100 aa, Homo sapiens
ATSGFPFNDAWMGWVRQAPGKGLEWVGRIKSKSNGGTTDYAAPVRGRFTISRDDSRNTVYLQMNSLKTEDTAMYFCTTDGGLAPRPLFDYWGREPWSPSP

SEQ ID NO: 31706 - protein, 100 aa, Homo sapiens
ASGFTFSSAWMNWVRQAPGKGLEWVGRIKTKSDGGTTDYAAPVTGRFSISRDDSKNMVYLQMNSLKTEDTAMYFCTTDGGLAPRPLFDYWGRGTLVTVSS

SEQ ID NO: 31707 - protein, 97 aa, Homo sapiens
TVSGGSISSRDTYWGWIRQPPGKGLEWIGSHFYDGRTFYNPSLRSRVTISVDTSKNQFSLNLNSVTAADTAVYHCARRPWGSGFDYWGQGTLVTVSS

SEQ ID NO: 31708 - protein, 97 aa, Homo sapiens
TVSGGSISSKSNYWGWIRQPPGKGLEWIGSHYSDGRTFYNPSLRSRVTISVDTSKNQFSLNLNSVTAADTAVYHCARRPWGSGFDYWGQGTLVTVSS

SEQ ID NO: 31709 - protein, 97 aa, Homo sapiens
TVSGGSISSRNNYWGWIRQPPGKGLEWIGSHYSDGRTFYNPSLRSRVTISVDTSKNQFSLNLNSVTAADTAVYHCARRPWGSGFDYWGQGTLVTVSS

SEQ ID NO: 31710 - protein, 97 aa, Homo sapiens
TVSGGSISSRSNYWGWIRQPPGKGLEWIGSHYYDGRTFYNPSLRSRVTISVDTSKNQFSLNLNSVTAADTAVYHCARRPWGSGFDYWGQGTLVTVSS

SEQ ID NO: 31711 - protein, 97 aa, Homo sapiens
TVSGGSISSRNLYWGWIRQAPGKGLEWIGSHFYDGRTFYNPSLRSRVTISVDTSKNQFSLNLNSVTAADTAVYHCARRPWGSGFDYWGQGTLVTVSS

SEQ ID NO: 31712 - protein, 97 aa, Homo sapiens; identical to SEQ ID NO: 31710

SEQ ID NO: 31713 - protein, 97 aa, Homo sapiens
TVSGGSISSRSYYWGWIRQPPGKGLEWIGSHYSDGRTHYNPSLRSRVTISVDTSKNQFSLNLRSVTAADTAVYHCARRPWGSGFDYWGQGTLVTVSS

SEQ ID NO: 31714 - protein, 97 aa, Homo sapiens
TVSGGSISSKYDYWGWIRQPPGKGLEWIGSHYSDGRTFYNPSLRSRVTISVDTSKNQFSLNLNSVTAADTAVYHCARRPWGSGFDYWGQGTLVTVSS

SEQ ID NO: 31715 - protein, 97 aa, Homo sapiens
TVSGGSISSRNTYWGWIRQPPGKGLEWIGSHFYDGRTFYNPSLRSRVTISVDTSKNQFSLNLNSVTAADTAVYHCARRPWGSGFDYWGQGTLVTVSS

SEQ ID NO: 31716 - protein, 97 aa, Homo sapiens
TVSGGSISSRNTYWGWIRQPPGKGLEWIGSHFSDGRTFYNPSLRSRVTISVDTSKNQFSLNLNSVTAADTAVYHCARRPWGSGFDYWGQGTLVTVSS

SEQ ID NO: 31717 - protein, 97 aa, Homo sapiens
TVSGGSISSKYDYWGWIRQPPGKGLEWIGSHYSDGRTFYNPSLRTRVTISVDTSKNQFSLNLNSVTAADTAVYHCARRPWGSGFDYWGQGTLVTVSS

SEQ ID NO: 31718 - protein, 97 aa, Homo sapiens; identical to SEQ ID NO: 31715

SEQ ID NO: 31719 - protein, 97 aa, Homo sapiens
TVSGGSISSRYNYWGWIRQPPGKGLEWIGSQYYDGRTFYNPSLRSRVTISVDTSKNHFSLNLNSVTAADTAVYHCARRPWGSGFDYWGQGILVTVSS

SEQ ID NO: 31720 - protein, 96 aa, Homo sapiens
VSGGSISNRNDYWGWIRQPPGKGLEWIGSHFYDGRTFYNPSLRSRVTISVDTSKNQFSLTLNSVTAADTAVYHCARRPWGSGFDYWGQGTLVTVSS

SEQ ID NO: 31721 - protein, 98 aa, Homo sapiens
SVSGGSISSSSYYWGWIRQPPGKGLEWIGSIYYSGTTYYNPSLKSRVTISVDTSKNQFSLKLSSVTAADTAMYYCARLVGSSGSFDYWGQGTLVTVSS

SEQ ID NO: 31722 - protein, 98 aa, Homo sapiens
TVSGGSISSSSYYWGWIRQPPGRGLEWIASIYYSGTTYYNPSLKSRVTISVDTSKNQFSRKLSSVTATDTAVYYCARLVGSSGSFDYWGQGTLVTVSS

SEQ ID NO: 31723 - protein, 93 aa, Homo sapiens
TVSGASMSNYYWSWIRQPAGKGLEWIGRIFPSGSTNYNPSLKSRVTMSVDTSKNQFSLKVSSVTAADTAVYYCARGSMQVDYWGQGTLVTVSS

SEQ ID NO: 31724 - protein, 93 aa, Homo sapiens; identical to SEQ ID NO: 31723

SEQ ID NO: 31725 - protein, 93 aa, Homo sapiens
TVSGGSMSNYYWSWIRQPAGKGLEWIGRIFPSGSTNYNPSLKSRVTMSVDTSKNQFSLKLSSVTAADTAVYYCARGSMQVDYWGQGTLVTVSS

SEQ ID NO: 31726 - protein, 93 aa, Homo sapiens; identical to SEQ ID NO: 31725

SEQ ID NO: 31727 - protein, 93 aa, Homo sapiens
TVSGTSLNNWYWSWIRQPAGKGLEWIGRIFPSGSTNYNPSLKSRVTMSVDTSKNQFSLKLSSVTAADTAVYYCARGSMQVDYWGQGTLVTVSS

SEQ ID NO: 31728 - protein, 93 aa, Homo sapiens; identical to SEQ ID NO: 31725

SEQ ID NO: 31729 - protein, 93 aa, Homo sapiens
TVSGASLSNYYWSWIRQPAGKGLEWIGRIFPSGITNYNPSLKSRVTMSVDTSKNQFSLELSSVTAADTAVYYCARGSMQVDYWGQGTLVTVSS

SEQ ID NO: 31730 - protein, 93 aa, Homo sapiens
TVSGASMSNWYWSWIRQPAGKGLEWIGRIFPSGSTNYNPSLKSRVTMSVDTSKNQFSLKLSSVTAADTAVYYCARGSMQVDYWGQGTLVTVSS

SEQ ID NO: 31731 - protein, 93 aa, Homo sapiens
TVSGGSLSYYYWSWIRQPAGKGLEWIGRIFPSGSTNYNPSLKSRVTMSVDTSKNQFSLKLSSVTAADTAVYYCARGSMQVDYWGQGTLVTVSS

SEQ ID NO: 31732 - protein, 93 aa, Homo sapiens
TVSGASMSNYYWSWIRQPAGKGLEWIGRIFPSGSTNYNPSLKSRVTMSLDTSKNQFSLKVSSVTAADTAVYYCARGSMQVDYWGQGTLVTVSS

SEQ ID NO: 31733 - protein, 93 aa, Homo sapiens
TVSGGSMSNWYWSWIRQPAGKGLEWIGRIFPSGITNYNPSLKSRVTMSVDTSKNQFSLKLSSVTAADTAVYYCARGSMQVDYWGQGTLVTVSS

SEQ ID NO: 31734 - protein, 93 aa, Homo sapiens; identical to SEQ ID NO: 31723

SEQ ID NO: 31735 - protein, 93 aa, Homo sapiens
TVSGASMSNYYWSWIRQPAGKGLEWIGRIFPSGSTNYNPSLKSRVTMSVDTSKNQFSLKVSSVTAADTAVYYCARGSMQVDYWGQGSLVTVSS

SEQ ID NO: 31736 - protein, 93 aa, Homo sapiens
TVSGASMSNYYWSWIRQPAGKGLEWIGRIFPSGSTNYNPSLKSRVTMSVDTSKNQFSLKVSSVTAADTAVYYCARGSMQVDYWGQRTLVTVSS

SEQ ID NO: 31737 - protein, 93 aa, Homo sapiens; identical to SEQ ID NO: 31723

SEQ ID NO: 31738 - protein, 93 aa, Homo sapiens
TVSCASMSNYYWSWIRQPAGKGLEWIGRIFPSGSTNYNPSLKSRVTMSVDTSKNQFSLKVSSVTAADTAVYYCARGSMQVDYWGQGTLVTVSS

SEQ ID NO: 31739 - protein, 93 aa, Homo sapiens; identical to SEQ ID NO: 31723

SEQ ID NO: 31740 - protein, 92 aa, Homo sapiens
TVSGASMSNYYWSWIRQPAGKGLEWIGRIFPSGSTNYNPSLKSRVTMSVDTSKNQFSLKVSSVTAADTAVYYCARGSMQVDYWGQGTLVTVS

SEQ ID NO: 31741 - protein, 93 aa, Homo sapiens
TVSGASMSNYYWSWIRQPAGKGLEWIRRIFPSGSTNYNPSLKSRVTMSVDTSKNQFSLKVSSVTAADTAVYYCARGSMQVDYWGQGTLVTVSS

SEQ ID NO: 31742 - protein, 93 aa, Homo sapiens
TVSGGSMSNYYWSWIRQPTGKGLEWIGRIFPSGSTNYNPSLKSRVTMSVDTSKNQFSLKLSSVTAADTAVYYCARGSMQVDYWGQGTLVTVSS

SEQ ID NO: 31743 - protein, 93 aa, Homo sapiens
TVSGTSMSNYYWSWIRQPAGKGLEWIGRIFPSGSTNYNPSLKSRVTMSVDTSKNQFSLKVSSVTAADTAVYYCARGSMQVDYWGQGTLVTVSS

SEQ ID NO: 31744 - protein, 93 aa, Homo sapiens; identical to SEQ ID NO: 31723

SEQ ID NO: 31745 - protein, 93 aa, Homo sapiens; identical to SEQ ID NO: 31723

SEQ ID NO: 31746 - protein, 93 aa, Homo sapiens; identical to SEQ ID NO: 31723

SEQ ID NO: 31747 - protein, 93 aa, Homo sapiens
TVSGASMSNYYWSWIRQPAGKGLEWIGRIFPSGSTNYNPSLKSRVTMSVDTSKNQFSLKVSSVTAADTAVYCCARGSMQVDYWGQGTLVTVSS

SEQ ID NO: 31748 - protein, 93 aa, Homo sapiens; identical to SEQ ID NO: 31723

SEQ ID NO: 31749 - protein, 93 aa, Homo sapiens; identical to SEQ ID NO: 31723

SEQ ID NO: 31750 - protein, 93 aa, Homo sapiens; identical to SEQ ID NO: 31725

SEQ ID NO: 31751 - protein, 93 aa, Homo sapiens
TVSGASMSNYYWSWIRQPAGKGLEWIGRIFPSESTNYNPSLKSRVTMSVDTSKNQFSLKVSSVTAADTAVYYCARGSMQVDYWGQGTLVTVSS

SEQ ID NO: 31752 - protein, 93 aa, Homo sapiens
TVSGGSMSNYYWSWIRQPAGKGLEWIGRIFPSGSTNYNPSLKSRVTMSVDTSKNQFSPKLSSVTAADTAVYYCARGSMQVDYWGQGTLVTVSS

SEQ ID NO: 31753 - protein, 93 aa, Homo sapiens; identical to SEQ ID NO: 31723

SEQ ID NO: 31754 - protein, 93 aa, Homo sapiens
TVSGTSLNNWYWSWIRHPAGKGLEWIGRIFPSGSTNYNPSLKSRVTMSVDTSKNQFSLKLSSVTAADTAVYYCARGSMQVDYWGQGTLVTVSS

SEQ ID NO: 31755 - protein, 93 aa, Homo sapiens; identical to SEQ ID NO: 31730

SEQ ID NO: 31756 - protein, 93 aa, Homo sapiens; identical to SEQ ID NO: 31723

SEQ ID NO: 31757 - protein, 93 aa, Homo sapiens; identical to SEQ ID NO: 31723

SEQ ID NO: 31758 - protein, 93 aa, Homo sapiens
TVSGGSMSNYYWSWIRQPAGKGLEWIERIFPSGSTNYNPSLKSRVTMSVDTSKNQFSLKLSSVTAADTAVYYCARGSMQVDYWGQGTLVTVSS

SEQ ID NO: 31759 - protein, 93 aa, Homo sapiens; identical to SEQ ID NO: 31725

SEQ ID NO: 31760 - protein, 93 aa, Homo sapiens
TVSGASMSNYYWSWIRQPAGKGLEWIERIFPSGSTNYNPSLKSRVTMSVDTSKNQFSLKVSSVTAADTAVYYCARGSMQVDYWGQGTLVTVSS

SEQ ID NO: 31761 - protein, 93 aa, Homo sapiens; identical to SEQ ID NO: 31725

SEQ ID NO: 31762 - protein, 93 aa, Homo sapiens; identical to SEQ ID NO: 31723

SEQ ID NO: 31763 - protein, 93 aa, Homo sapiens
TVSGGSMSNYYWSWIRQPAGKGLEWIGSIFPSGSTNYNPSLKSRVTMSVDTSKNQFSLKLSSVTAADTAVYYCARGSMQVDYWGQGTLVTVSS

SEQ ID NO: 31764 - protein, 93 aa, Homo sapiens
TVSGTSLNNWYWSWIRRPAGKGLEWIGRIFPSGSTNYNPSLKSRVTMSVDTSKNQFSLKLSSVTAADTAVYYCARGSMQVDYWGQGTLVTVSS

SEQ ID NO: 31765 - protein, 93 aa, Homo sapiens
TVSGASMSNYYWSWIRQPAGKGLEWIGRIFPSGSTNYNPSLKSRVTMSVDTSKNQFSLKLSSVTAADTAVYYCARGSMQVDYWGQGTLVTVSS

SEQ ID NO: 31766 - protein, 93 aa, Homo sapiens
TVSGASMSNYYWSWIRQPAGKGLEWIGRIFPSGNTNYNPSLKSRVTMSVDTSKNQFSLKVSSVTAADTAVYYCARGSMQVDYWGQGTLVTVSS

SEQ ID NO: 31767 - protein, 93 aa, Homo sapiens
TVSGGSMSNYYWSWIRQPAGKGLEWIGRIFPSGSTNYNPSLKSRVTMSVDTSKNQFSLKLSSVTAADTAVHYCARGSMQVDYWGQGTLVTVSS

SEQ ID NO: 31768 - protein, 93 aa, Homo sapiens
TVTGTSLNNWYWSWIRQPAGKGLEWIGRIFPSGSTNYNPSLKSRVTMSVDTSKNQFSLKLSSVTAADTAVYYCARGSMQVDYWGQGTLVTVSS

SEQ ID NO: 31769 - protein, 91 aa, Homo sapiens
SGASMSNYYWSWIRQPAGKGLEWIGRIFPSGSTNYNPSLKSRVTMSVDTSKNQFSLKVSSVTAADTAVYYCARGSMQVDYWGQGTLVTVSS

SEQ ID NO: 31770 - protein, 93 aa, Homo sapiens
TVSGASMSNYYWSWIRQPAGKGLEWIGRIFLSGSTNYNPSLKSRVTMSVDTSKNQFSLKVSSVTAADTAVYYCARGSMQVDYWGQGTLVTVSS

SEQ ID NO: 31771 - protein, 93 aa, Homo sapiens
TVSGASMSNHYWSWIRQPAGKGLEWIGRIFPSGSTNYNPSLKSRVTMSVDTSKNQFSLKVSSVTAADTAVYYCARGSMQVDYWGQGTLVTVSS

SEQ ID NO: 31772 - protein, 93 aa, Homo sapiens
TVSGASMSNYYWSWIRQPAGKGLEWIGRILPSGSTNYNPSLKSRVTMSVDTSKNQFSLKVSSVTAADTAVYYCARGSMQVDYWGQGTLVTVSS

SEQ ID NO: 31773 - protein, 93 aa, Homo sapiens
TVSSASMSNYYWSWIRQPAGKGLEWIGRIFPSGSTNYNPSLKSRVTMSVDTSKNQFSLKVSSVTAADTAVYYCARGSMQVDYWGQGTLVTVSS

SEQ ID NO: 31774 - protein, 93 aa, Homo sapiens; identical to SEQ ID NO: 31723

SEQ ID NO: 31775 - protein, 93 aa, Homo sapiens
TVSGASMSNYYWSWIRQPAGKGLEWIGRIFPSGSTNYNPSLKSRVTMSVDTSKNQFSLTVSSVTAADTAVYYCARGSMQVDYWGQGTLVTVSS

SEQ ID NO: 31776 - protein, 93 aa, Homo sapiens
TVSGASMSNYYWSWIRQPVGKGLEWIGRIFPSGSTNYNPSLKSRVTMSVDTSKNQFSLKVSSVTAADTAVYYCARGSMQVDYWGQGTLVTVSS

SEQ ID NO: 31777 - protein, 93 aa, Homo sapiens; identical to SEQ ID NO: 31725

SEQ ID NO: 31778 - protein, 93 aa, Homo sapiens; identical to SEQ ID NO: 31727

SEQ ID NO: 31779 - protein, 93 aa, Homo sapiens; identical to SEQ ID NO: 31723

SEQ ID NO: 31780 - protein, 93 aa, Homo sapiens
TVSGASMSNYYWSWIRQPAGKGLEWIGRIFPSGSTNYNSSLKSRVTMSVDTSKNQFSLKVSSVTAADTAVYYCARGSMQVDYWGQGTLVTVSS

SEQ ID NO: 31781 - protein, 93 aa, Homo sapiens; identical to SEQ ID NO: 31723

SEQ ID NO: 31782 - protein, 93 aa, Homo sapiens
TVSGVSMSNYYWSWIRQPAGKGLEWIGRIFPSGSTNYNPSLKSRVTMSVDTSKNQFSLKLSSVTAADTAVYYCARGSMQVDYWGQGTLVTVSS

SEQ ID NO: 31783 - protein, 93 aa, Homo sapiens
TVSGASMSNYYWSWIRQPAGKGLEWIGRIFPSGSTNHNPSLKSRVTMSVDTSKNQFSLKVSSVTAADTAVYYCARGSMQVDYWGQGTLVTVSS

SEQ ID NO: 31784 - protein, 96 aa, Homo sapiens
TVSGGSISGYYWTWIRQPPGKGLEWIAYIYSSGKTNYNPSLQSRITITLDTSKKQFSLKVTSVTAADTAVYFCARGDHYYNYMDVWGKGTTVTVSS

SEQ ID NO: 31785 - protein, 96 aa, Homo sapiens
TVSGGSISGYYWSWIRQPPGKGLEWIGYIYSTGSTNYNPSLKSRVTISVDTSKNQFSLKLSSVTAADTAVYYCARGDHYYNYMDVWGRGTTVTVSS

SEQ ID NO: 31786 - protein, 96 aa, Homo sapiens
TVSGGSISGYYWTWIRQPPGKGLEWIDYIYSSGKTNYNPSLQSRITITLDTSKKQFSLKVTSVTAADTAVYFCARGDHYYNYMDVWGKGTTVTVSS

SEQ ID NO: 31787 - protein, 101 aa, Homo sapiens
TVSGFRLGDYSLSWVRQAPGKGLEWVGIIRSETSGGTTAYAASVNGRFTISRDDSNNIAYLQMNSLKTEDTAVYYCSRDEYGSGIPHMDVWGKGTTVTVSS

SEQ ID NO: 31788 - protein, 101 aa, Homo sapiens
TASGFTFGDCAMSWVRQAPGKGLEWVGSIRKKTNGGTTEYAASVRGRFTISRDDSKGIAYLQMDSLKTEDTAVYYCSRDEYGSGIPHMDVWGKGTTVTVSS

SEQ ID NO: 31789 - protein, 101 aa, Homo sapiens; identical to SEQ ID NO: 31788

SEQ ID NO: 31790 - protein, 95 aa, Homo sapiens
ASGYTFTSYYMHWVRQAPGQGLEWMGMSDPSDGSINYAQKFQGRVSMTRDTSTSTVYMELSSLRSEDTAMYYCAREYRGGYFDYWGQGTLVTVSS

SEQ ID NO: 31791 - protein, 95 aa, Homo sapiens
ASGYTFTSYYVHWVRQAPGQGLEWMGIIIPSDGNTGYAQSFQGRVTMNRDTSTSIVYMEVSSLRSEDTAVYYCAREYRGGYFDYWGQGTLVTVSS

SEQ ID NO: 31792 - protein, 96 aa, Homo sapiens
AASGFTFSSYWMHWVRQVPGKGLVWVSRINTDGSSTTYADSVKGRFTISRDNAKNTLYLQMHSLRVEDTSVYYCTRDSSTSEFDYWGQGTLVTVSS

SEQ ID NO: 31793 - protein, 96 aa, Homo sapiens
AASGFTFNNYWMHWVRQAPGKGLVWVSRINSDGSSTTYADSVKGRFTISRDNAMTTMYLQMNSLRAEDTAVYYCTRDSSTSEFDYWGQGTLVTVSS

SEQ ID NO: 31794 - protein, 96 aa, Homo sapiens
TVSGGSISSYYWSWMRQPPGKALEWIGYIYYSGSTNYNPSLKSRVTMSVDTSKNQFSLKLSSVTAADTAVYYCARRSPLENFFDYWGQGTLVPVSS

SEQ ID NO: 31795 - protein, 96 aa, Homo sapiens
TVSGGSISSYYWSWIRQPPGKGLEWIGYIYYSGSTNYNPSLRSRVTISVDTSKSQFSLKLSSVTAADTAVYYCARRSPLENFFDYWGQGTLIPVSS

SEQ ID NO: 31796 - protein, 96 aa, Homo sapiens
TVSGGSISSYYWSWIRQPPGKGLEWIGYINYSGSTNYNPSLKSRITMSVDTSKNQFSLNLSSVTTADTAVYYCARRSPLENFFDYWGQGTLIPVSS

SEQ ID NO: 31797 - protein, 96 aa, Homo sapiens
TVSGASISSYYWSWIRQPPGKGLEWIGYIYYSGSTNYNPSLKSRVTISVDTSKNQFSLKLTSVTAADTAVYSCARRSPLENFFDYWGQGTLVTVSS

SEQ ID NO: 31798 - protein, 98 aa, Homo sapiens
AASGLSFSSYGMNWVRQAPGKGLEWVAVIWYDGSNEYYADSVKGRFTISRDNSKNTLYLQMNSLRAEDTAVYYCVRNPAEGYYGMDVWGQGTTVTVSS

SEQ ID NO: 31799 - protein, 98 aa, Homo sapiens; identical to SEQ ID NO: 31798

SEQ ID NO: 31800 - protein, 98 aa, Homo sapiens
AASGFDFRSYGMNWVRQAPGKGLEWVAVIWYDGSNEYYGDAVKGRFTISRDNSKNMLYLQMNSLRGEDTAVYYCVRNPAEGYYGMDVWGQGTTVTVSS

SEQ ID NO: 31801 - protein, 105 aa, Homo sapiens
AASGFTFSNAWMNWVRQAPGKGLEWVGRIQSRADGGTTDYAAPVKGRITISRDDSKNTLYLQINSLKTEDTAVYYCATHPPRWGSWYTGYGVDVWGQGTTVTVSS

SEQ ID NO: 31802 - protein, 105 aa, Homo sapiens; identical to SEQ ID NO: 31801

SEQ ID NO: 31803 - protein, 96 aa, Homo sapiens
AASGFTFRAYAMYWVRQAPGKGLEWVSSVGGGGRNTQYSDSVKGRFSISRDDSKNTLFLQMNSLRAEDTAVYYCAKLVGTNTEDFWGQGTLVTVSS

SEQ ID NO: 31804 - protein, 96 aa, Homo sapiens
AASGFTFSRYAMYWVRQAPGRGLEWVSSIPASGGGTDYADSVKGRFTVSRDNSKNTVYLQMSSLRAEDTAVYYCAKLVGTNTEDFWGQGTLVVVSS

SEQ ID NO: 31805 - protein, 96 aa, Homo sapiens
TVSGGSIRDYYWTWIRQPPGKGLEWIGYIYNSGSSNYNPSLKSRVTISVDTSKNQFSLKLTSVTAADTALYYCARGRMVTRDFDFWGQGTLVTVSS

SEQ ID NO: 31806 - protein, 96 aa, Homo sapiens
TVSGGSIRDYYWTWIRQPPGKGLEWIGYIYHSGSSNYNPSLKSRVTISVDTSKNQFSLKLTSVTAADTALYYCARGRMVTRDFDFWGQGTLVTVSS

SEQ ID NO: 31807 - protein, 96 aa, Homo sapiens
TVSGGSIRDYYWTWIRQPPGKGLEWIGYVYNSGSSNYNPSLKSRVTISVDTSKNQFSLKMISVTAADAALYYCARGRMVTRDFDFWGQGTLVTVSS

SEQ ID NO: 31808 - protein, 92 aa, Homo sapiens
ASGYTFTNYAMHWVRQAPGQRLEWLGWIIAGNGNTKYSQNFQGRITITRDTSASTTYMELSSLRSEDTAVYYCARTGSLDNWGQGTLVTVSS

SEQ ID NO: 31809 - protein, 92 aa, Homo sapiens; identical to SEQ ID NO: 31808

SEQ ID NO: 31810 - protein, 92 aa, Homo sapiens; identical to SEQ ID NO: 31808

SEQ ID NO: 31811 - protein, 92 aa, Homo sapiens
ASGYSFTSYPLQWVRQAPGQRPEWMGWINPGNGNTKYSQKFQGRVTITRDTSASTVYMELSSLRSEDTAVFYCARTGSLDNWGQGTQVTVSS

SEQ ID NO: 31812 - protein, 97 aa, Homo sapiens
AASGFTFSNYAMNWVRQAPGKGLEWVSDISTSGVNTHYADSVTGRFTISRDNSKNTLYLQMNSLRAEDTAVYYCAKRESSSWTFDYWGQGTLVTVSS

SEQ ID NO: 31813 - protein, 97 aa, Homo sapiens
AASGFTFSSCAMGWVRQAPGKGLEWVSGISGSGANTYYADSVKGRFTISRDNSKDTLDLQMNSLRVEDAAVYYCAKRESSSWTFDYWGQGTLVTVSS

SEQ ID NO: 31814 - protein, 100 aa, Homo sapiens
AASGFTFTTYAMSWVRQAPGKGLEWVSTISSSGGSTYYTESVKGRFIISRDNSKSTLHLQMNSLTADDTAVYYCAKDGDHRYYYNGFDVWGPGTTVTVSS

SEQ ID NO: 31815 - protein, 100 aa, Homo sapiens
AASGFTFSSYAMSWVRQAPGKGLEWVSTISSSGSSTYYADSVKGRFTISRDNSKSTLHLQMNSLTAEDTAIYYCAKDGDHRYYYNGFDVWGPGTTVTVSS

SEQ ID NO: 31816 - protein, 94 aa, Homo sapiens
AASGFTFSSYWMDWVRQAPGKGLVWVSRINSDGSNTIYADSVKGRFTISRDNAKNTVYLQMNSLRAEDTAMYYCTRGDNGFDPWGQGTLVTVSS

SEQ ID NO: 31817 - protein, 94 aa, Homo sapiens; identical to SEQ ID NO: 31816

SEQ ID NO: 31818 - protein, 94 aa, Homo sapiens
AASGFTFSSYWMYWVRQVPGEGLVWVSQIDAVGRGTNYADSVKGRFTISRDNAKNTVYLQMNSLRVEDTAVYYCTRGDNGFDPWGRGTLVSVSS

SEQ ID NO: 31819 - protein, 90 aa, Homo sapiens
AASGFSFSSSTMYWVRQAPGKGLECVSIMSGSGSSTSYADSVKGRFTISRDNSKNTLFLQMNSLRAEDTAVYYCAKPGGWGQGTLVTVSS

SEQ ID NO: 31820 - protein, 90 aa, Homo sapiens
AASGFTFSSSAMSWVRQAPGKGLEWVSAISDSGGSTYYADSVRGRFTISRDNSKNTLYLQMNSLRAEDTAVYYCAKPGGWGQGILVTVSS

SEQ ID NO: 31821 - protein, 90 aa, Homo sapiens; identical to SEQ ID NO: 31820

SEQ ID NO: 31822 - protein, 94 aa, Homo sapiens
AASGFTFSPYTMHWVRQDPGKGLVWVSRISSDETRSYADSVKGRFTISRDNAKSTVYLQMNSLRAEDTSMYYCTRSVENGMDVWGQGTTVTVSS

SEQ ID NO: 31823 - protein, 93 aa, Homo sapiens
SGFTFSPYTMHWVRQAPGKGLVWVSRINGAGNIKSYADSVRGRLTISRDNAKSTVFLQMNSLRVEDTGVYYCTRSVENGMDVWGQGTTVTVSS

SEQ ID NO: 31824 - protein, 95 aa, Homo sapiens
AVYGGSFSDYYWGWIRQSPGKGLEWIGEIHPSGSTDYNPSLMSRVTMSVDTSNNQFSLKLTSVTAADTAVYYCTRGPDSRKHGYWGQGTLVTVSS

SEQ ID NO: 31825 - protein, 95 aa, Homo sapiens
AVYGGSCSGYYCSWIRQSPGKGLEWIGEISQVEGIRYNPSLNNRVTISLDSSQSQISLNLNSVSAADTAVYYCTRGPDSRKHGYWGQGTLVTVSS

SEQ ID NO: 31826 - protein, 92 aa, Homo sapiens
AASGFPFSSFSMSWVRRAPGKGLEWVANIKQDGSEKYYVDSVKGRFTISRDNAKSSLYLQMNSLRAEDTALYYCARGRAAIWGQGTMVTVSS

SEQ ID NO: 31827 - protein, 92 aa, Homo sapiens
AASGLTFSNYWMSWVRLTPGKGLEWVANIKQDGSEKNYVDSVRGRFTISRDNAKNSLYLQMNSLRVEDTSVYYCARGRAAIWGQGTMVTVSS

SEQ ID NO: 31828 - protein, 96 aa, Homo sapiens
AASGFTFSNAWMSWVRQAPGKGLEWVGRIKSRTDGGATDYATPVKGRFTISRDDSKNTLYLQMNSLKIEDTAVYYCATIWFGEQDWGQGTLVTVSS

SEQ ID NO: 31829 - protein, 96 aa, Homo sapiens
AASGFTFSNAWMSWVRQAPGNGLEWVGLIKSKTDGGTTDYAAPVKGRFTISRDDTKNTLYLQMNSLKTEDTAVYYCATIWFGEQDWGQGTLVTVSS

SEQ ID NO: 31830 - protein, 95 aa, Homo sapiens
AASGFTFSNAWMSWVRQAPGNGLEWVGLIKSKTDGGTTDYAAPVKGRFTISRDDTKNTLYLQMNSLKTEDTAVYYCATIWFGEQDWGQGTLSPSP

SEQ ID NO: 31831 - protein, 98 aa, Homo sapiens
GASGYSFSTYAINWVRQAPGKGLEWVSSISATGTFIYYADLVQGRFTISRDNAKNSLYLQMDNLRAEDTAVYYCARGNGNYRYYFDYWGQGTPVTVSS

SEQ ID NO: 31832 - protein, 98 aa, Homo sapiens
AASGFTFSNYGMNWIRQTPGKGLEWISSVTSSSAYTYYIDSVKGRFTVSRDNAKNSLYLQMDSLRVEDTAVYYCARGNGNYRYYFDYWGQGTLVTVSS

SEQ ID NO: 31833 - protein, 94 aa, Homo sapiens
AASGFTFNNYWMHWVRQPPGKGLVWVSRINNDGSSTNYADSVKGRFTISRDNAKNTLYLQMNSLRAEDMAVYYCARGRVGATHWGQGTLVTVSS

SEQ ID NO: 31834 - protein, 94 aa, Homo sapiens
AASGFTFSSYWMHWVRQAPGKGLVWVSRINTDGSSTNYADSVKGRFTISRDNAKNTLYLQMNSLRAEDTAVYYCARGRVGATHWGQGTLVTVSS

SEQ ID NO: 31835 - protein, 95 aa, Homo sapiens
AASGFTFSSYAMSWVRQAPGKGLEWVSVIFSAGSTTHYADSVKGRFTISRDNSRNILYLQMDSLRVEDTAIYYCARDHIGREGYWGQGTPVTVSS

SEQ ID NO: 31836 - protein, 95 aa, Homo sapiens
AASGFTFSSYAMSWVRQAPGKGLEWVSTIFSAGSSTYYADSVKGRFTISRDNSKNTLFLQMNSLRADDTAVYYCARDHIGREGYWGQGTLVTVSS

SEQ ID NO: 31837 - protein, 95 aa, Homo sapiens; identical to SEQ ID NO: 31836

SEQ ID NO: 31838 - protein, 95 aa, Homo sapiens; identical to SEQ ID NO: 31836

SEQ ID NO: 31839 - protein, 93 aa, Homo sapiens
AASGFTFTTYAMSWVRQAPGKGLEWVAVIFGSTTHYADSVKGRFTISRDDSKNTLYLQMNSLRAEDTALYFCARDHIGREGYWGLGTLVTVSS

SEQ ID NO: 31840 - protein, 94 aa, Homo sapiens
AVSGLSFSTIGMHWVRQAPGKGLEWVAVIWFDGKKKFYADSVKGRFTISRDNSNKTLYLQMNSLRAEDTGIYYCARDRERMDVWGQGTTVTVSS

SEQ ID NO: 31841 - protein, 94 aa, Homo sapiens
AVSGLSFSTIGMHWVRQAPGKGLEWVAVIWFDGKKKFYADSVKGRFTISRDNSNKTLYLQMNSLRAEDTGVYYCARDRERMDVWGQGTTVTVSS

SEQ ID NO: 31842 - protein, 94 aa, Homo sapiens
AASGFSFRTIGMHWVRQAPGKGLEWVAVIWFDGSYKYYADSVKGRFTISRDNSNNTLYLQMNSLRAEDTAVYYCARDRERMDVWGQGTTVTVSS

SEQ ID NO: 31843 - protein, 96 aa, Homo sapiens
TVSGDSISSHYWSWIRQSPGKRLEWIGYIQKGGITNYNPSLRSRVTTSVDTSKNDFSLTLDSVTAADTGVYYCAMDTHSNSRFDHWGQGILVIVSS

SEQ ID NO: 31844 - protein, 96 aa, Homo sapiens
TVSGDSINTYYWSWIRQPPGKGLEWIGYIYYTGSTDYNPSLRSRVTMSLDTAKNQFSLRLTSVTAADTAIYYCAMDTHSNSRFDHWGQGTLVTVSS

SEQ ID NO: 31845 - protein, 96 aa, Homo sapiens
VVSGIKFHDHAMHWVRQVPGKGLEWVSGIFLRNGETGYADSVKGRFTVSRDNAKDSLYLEMNSLRVEDTAFYYCIKDVSPGGADYWGQGTLVTVSS

SEQ ID NO: 31846 - protein, 96 aa, Homo sapiens
VGSEFRSNEHAMHWVRQAPGKGLEWVSGFMWDRVRIGYADSVKGRFTISRDDAKKSLYLQMNNLRPEDTALYFCIKDVSPGGADYWGQGIQVTVSS

SEQ ID NO: 31847 - protein, 95 aa, Homo sapiens
ASGYTFTNYYMHWVRQAPGQGLEWLGIIIPSGGSTNYAQKFQGRVTMTRDTSTSTVYMELTSLRSEDTAVYYCAREMVGGYFDYWGQGTLVTVSS

SEQ ID NO: 31848 - protein, 95 aa, Homo sapiens
ASGYTFTSYYIHWVRQAPGQGLEWMGIIIPAGGSTNYAQSFQGRLTMTSDTSTSTVSMELTSLRSEDTAIYYCAREMVGGYFDYWGQGALVTVSS

SEQ ID NO: 31849 - protein, 96 aa, Homo sapiens
AASGFTVSSNYMSWVRQAPGKGLEWVSVISSGGSTYYADSVKGRFTISRHNSKNTLYLQMNSLRAEDTAVYYCARDPPYSSGWSDWGQGTLVTVSS

SEQ ID NO: 31850 - protein, 96 aa, Homo sapiens
AASGFTVSSNYMSWVRQAPGKGLEWVSVIYSGGSTYYADSVKGRFTISRDNSKNTVYLQMNSLRVEDTAVYYCARDPPYSSGWSDWGQGTLVTVSS

SEQ ID NO: 31851 - protein, 102 aa, Homo sapiens
AASGLTFSSNALSWVRQAPGMGLEWVSEISGSGGNTNYADSVKGRFTISRDNSKNTVYLQMNILRAEDTAVYYCAKFYTRSSVDYYYFMDVWGKGTTVTVSS

SEQ ID NO: 31852 - protein, 102 aa, Homo sapiens
AASGLTFSSNAMSWVRQAPGKGLEWVSEISGSGGNTNYAGSVKGRFTISRDNSKNTVYLQMNILRAEDTAVYYCAKFYTRSSVDYYYFMDVWGKGTTVTVSS

SEQ ID NO: 31853 - protein, 92 aa, Homo sapiens
AASGFTFRSYEMSWVRQAPGKGLEWVSYISGSGGTIHYADSVKGRFTISRDNAKNSLYLQMNSLRVEDTAVYYCARRTIDYWGQGTLVTVSS

SEQ ID NO: 31854 - protein, 92 aa, Homo sapiens
AASGFSFRSYEMSWVRQAPGKGLEWVSYISGSGGTIHYADSVKGRFTISRDNAKNSLYLQMNSLRAEDTAVYYCARRTIDYWGQGTLVTVSS

SEQ ID NO: 31855 - protein, 92 aa, Homo sapiens
VGSGFTFRSYEMSWVRQAPGKGLEWISYISGSGGTIHYADSVKGRFTISRDNAENSVYLQMNSLRVEDTAVYFCARRTIDYWGQGTLVIVSS

SEQ ID NO: 31856 - protein, 95 aa, Homo sapiens
TVSSGSIGSYYWSWIRQPPGKGLEWIGYIYYSGSTNYNPSLKSRVTISVDTSTNQFSLKLSSVTAADTAVYYCARRRSYGYLDYWGQGTLVTVSS

SEQ ID NO: 31857 - protein, 95 aa, Homo sapiens
TVSGDSISSYYWNWIRQPPGKGLEWIGYIYYTGSTNYNPSLKSRVTISLDTSKNQFSLKLSSVTAADTAVYYCARRRSYGYLDYWGQGTLVTVSS

SEQ ID NO: 31858 - protein, 96 aa, Homo sapiens
VASEFTFSSYEMNWVRQAPGKGLEWVSYISSSGSTTYYADSVKGQFTISRDNAKNSLYLQMNSLRAEDTAVYYCARDLSGYGMDVWGQGTTVTVSS

SEQ ID NO: 31859 - protein, 96 aa, Homo sapiens
AGSGFTFSNHAMDWVRQAPGKGLEWVSYISGNKKAIYYADSVKGRFTISRDNAKNSLNLQMNSLRDEDTAVYYCARDLSGYGMDVWGQGTTVTVSS

SEQ ID NO: 31860 - protein, 97 aa, Homo sapiens
AASAVALNGFPMNWVRQTPGKGLEWISYISNSGSTIYYADSVKGRFTISRDNAKNSLYMQMNSLRAEDTAVYYCARGLGLGHYFESWGQGTLVTVSS

SEQ ID NO: 31861 - protein, 98 aa, Homo sapiens
AASGFIFNNFPINWVRQAPGKGLEWISYISRDSGSTIYYADSVKGRFTISRDNAKNALYLQMNSLRVEDTAVYYCARGLGLGHYFESWGQGTPVTVSS

SEQ ID NO: 31862 - protein, 97 aa, Homo sapiens
AASGFSFSVSAMHWVRQAPGKGLEWVSVMSFDGNNIYYADSVKGRFTISRDNSKNTLYLQMNSLRAEDTAVYYCARDLRKLRYFDWWGQGTLVTVSS

SEQ ID NO: 31863 - protein, 97 aa, Homo sapiens
AASGFTFSGSAMHWVRQAPGKGLEWLTVMSYDGNNIYYADAVKGRFTISRDNSKNTLFLQLTSLRPDDTAFYYCARDLRKLRYFDWWGQGTLVTVSS

SEQ ID NO: 31864 - protein, 95 aa, Homo sapiens
AASGFSISPYAITWVRHDPGKGLEWVSIIWSNGKTYYAESAKGRFTISRDNSKNIVNLEMTSLRAEDTAVYYCGSGSYASGFEYRGQGTQVIVSS

SEQ ID NO: 31865 - protein, 95 aa, Homo sapiens
AASGFSISPYAITWVRHDPGKGLEWVSIIWSNGKTYYAESAKGRFTISRDNSKNIVYLEMSSLRAEDTAVYYCGSGSYASGFEYWGQGTQVIVSS

SEQ ID NO: 31866 - protein, 97 aa, Homo sapiens
TVSSDSISSYSWSWIRQPAGKGLEWIGRVYASGSPNYNPSLKSRVTMSVETSKNQVSLNLNSVTAADTAVYYCARVSAITLAGFDYWGQGMVVTVSS

SEQ ID NO: 31867 - protein, 97 aa, Homo sapiens
NVSSVSMNSYSWSWIRQPAGKGLEWIGRVYTRGSPNYNPSLRSRVAMSVDMSKNQVSLTLTSVTAADTAVYYCARVSAITLAGFDYWGQGTPVTVSS

SEQ ID NO: 31868 - protein, 103 aa, Homo sapiens
AGSGFTFSSYALHWVRHPPGKGLEWVAIISSIGNNQYYADSVKGRFTISRDNPRKTFYLEMNRLRVEDTAVYYCAREDQHYYGSGYYYAMDVWGQGTTVTVSS

SEQ ID NO: 31869 - protein, 101 aa, Homo sapiens
GSGFTFSSYAMHWVRQAPGKGLEWVTVISYDGRNIYYADSVKGRFTISRDNSKNMQSLHMDSLRPEDTAIYYCAREDQHYYGSGYYYAMDVWGPGTTVTVS

SEQ ID NO: 31870 - protein, 96 aa, Homo sapiens
TVSGASISSYYWSWIRQPPGKGLEWIGYIYYGGSTNYNPSLKSRVTISLDTSKNQFSLQLSSVTAADTAVYYCARQGERGGPPDYWGQGTLVTVSS

SEQ ID NO: 31871 - protein, 96 aa, Homo sapiens
TVSGASISSYYWSWIRQPPGKGLEWIGFIYYRGSTNYNPSLKSRVTISLDTSKNQFSLQLSSVTAADTAVYYCARQGERGGPPDYWGQGTLVTVSS

SEQ ID NO: 31872 - protein, 96 aa, Homo sapiens; identical to SEQ ID NO: 31870

SEQ ID NO: 31873 - protein, 97 aa, Homo sapiens
AASGFTFSNYAMSWVRQAPGRGLEWVSIIYSAGTSTYYADSVKGRFTVSRDNSKNTLYLQMNNLRAEDAAVYYCAKPRNTDDAFDIWGQGTLVTVSS

SEQ ID NO: 31874 - protein, 97 aa, Homo sapiens
AASGFPFSDYAMSWVRQAPGKGLEWVSIIYSAGSSTYYADSVKGRFTISRDNSKNTLYLQMNSLRAEDTAVYYCAKPRNTDDAFDIWGQGTVVTVSS

SEQ ID NO: 31875 - protein, 96 aa, Homo sapiens
AASGFATSDYYMSWVRQAPGKGLEWVANIRQDGGETYYVDSVKGRFTISRDNAENSLYLQMDGLTAEDTALYYCARERPGRYFDYWGQGILVTVSS

SEQ ID NO: 31876 - protein, 96 aa, Homo sapiens; identical to SEQ ID NO: 31875

SEQ ID NO: 31877 - protein, 96 aa, Homo sapiens; identical to SEQ ID NO: 31875

SEQ ID NO: 31878 - protein, 96 aa, Homo sapiens; identical to SEQ ID NO: 31875

SEQ ID NO: 31879 - protein, 96 aa, Homo sapiens
AASGFATSDYYMSWVRQAPGKGLEWVANIRQDGGETYYVGSVKGRFTISRDNAENSLYLQMDGLTAEDTALYYCARERPGRYFDYWGQGILVTVSS

SEQ ID NO: 31880 - protein, 95 aa, Homo sapiens
ASGFATSDYYMSWVRQAPGKGLEWVANIRQDGGETYYVDSVKGRFTISRDNAENSLYLQMDGLTAEDTALYYCARERPGRYFDYWGQGILVTVSS

SEQ ID NO: 31881 - protein, 96 aa, Homo sapiens
AASGFAASDYYMSWVRQAPGKGLEWVANIRQDGGETYYVDSVKGRFTISRDNAENSLYLQMDGLTAEDTALYYCARERPGRYFDYWGQGILVTVSS

SEQ ID NO: 31882 - protein, 96 aa, Homo sapiens
AASGFIFRSLWMAWVRQAPGKGLEWVAMIKEDGSEKYYVDSVKGRFTISRDNAKNSLYLQMSSLRVEDTAVYFCARERPGRYFDYWGQGIQVTVSS

SEQ ID NO: 31883 - protein, 94 aa, Homo sapiens
ASGFTFPSHWMGWVRRAPGKGLEWVADIKTDGSEKSYVDSVKGRFTISRDNARNSLFLQMNSLRAEDTAVYFCARDYFRSYDYWGQGTLVTVSS

SEQ ID NO: 31884 - protein, 94 aa, Homo sapiens; identical to SEQ ID NO: 31883

SEQ ID NO: 31885 - protein, 95 aa, Homo sapiens
AASGFSFSDSWMHWVRQAPGKGLEWVAQIKPDGSEQSYVDSVKGRFTISRDNAKNSLYLQMNSLRAEDAAVYYCARDYFRSYDYWGQGTLVTVSS

SEQ ID NO: 31886 - protein, 92 aa, Homo sapiens
AASGFTFSSYWMSWVRQTPGKGLEWVANIKEDGSDKYYVDSVKGRFTISRDNAKNSLYLQMNSLRAEDTAVYYCARSKFDYWGQGTLVTVSS

SEQ ID NO: 31887 - protein, 92 aa, Homo sapiens
AASGFTFNSYWMSWVRQAPGKGLEWVANIKQDGSEKYYVDSVKGRFTISRDNAKNSLYLQMNSLRAEDTAVYYCARSKFDYWGQGTLVTVSS

SEQ ID NO: 31888 - protein, 95 aa, Homo sapiens
AASGFTFSNYWMTWARQAPGKGLECVASLNQAGSDKYYVDSVKGRFTISRDNAENLLYLQLNSLRVEDTAVYYCARAAWSSVDYWGLGTLVTVSS

SEQ ID NO: 31889 - protein, 95 aa, Homo sapiens
AASGFTFSTYWMSWVRQAPERGLEWVANINKEGSAKHYVDSVKGRFTISRDNAKNSLYLQMNSLRAEDTAVYFCARAAWSSVDYWGQGTLVTVSS

SEQ ID NO: 31890 - protein, 96 aa, Homo sapiens
TVSGASFSSYYWSWIRQPPGKGLEWIGYFHYSGSTKYNPSLKSRVAISVDTSKNQFSLKLTSVTAADTAVYYCARSVGLGNYFDYWGQGNVVTVSS

SEQ ID NO: 31891 - protein, 95 aa, Homo sapiens
TVSGGSISSYYWNWIRQPPGKGLEWIGYTHYSGRTNYNPSLKSRVTISMDTSKNQFSLKLTSVTAADTAVYFCARSVGLGNYFDYWGQGTLVTVS

SEQ ID NO: 31892 - protein, 95 aa, Homo sapiens
TVSGGSLSIYYWSWVRQPAGKGLEWIGRIYNTGSTNSNPSLKSRVTISVDKSKNQFSLRLTSVTAADTAVYYCARSFDEKAFDIWGAGTVVTVSS

SEQ ID NO: 31893 - protein, 95 aa, Homo sapiens
TVSGGSLSIYYWSWVRQPAGKGLEWIGRIYSTGSTNSNPSLKSRVTISVDKSKNQFSLRLSSVTAADTAVYFCARSFDEKAFDIWGEGTVVTVSS

SEQ ID NO: 31894 - protein, 95 aa, Homo sapiens
TVSGGSISGYYWSWIRQPAGKGLEWIGRIYTSGNTNYNPSLKSRVTMSVDTSKNQFSLKLSSVTAADTAVYSCARSFDEKAFDIWGQGTMVTVSS

SEQ ID NO: 31895 - protein, 96 aa, Homo sapiens
AASRFTFSDYYMTWIRQAPGKGLEWVSYISSSGGTIYYADSVKGRFTVSRDNAKNSLYLQMNSLRAEDTAVYYCARAVAGWYFDLWGRGTLVTVSS

SEQ ID NO: 31896 - protein, 96 aa, Homo sapiens
AASGFTFSDYYMTWIRQAPGKGLEWLSYISSSDNTIYYADSVEGRFTISRDNAKKSLYLQMNSLRAEDTAVYYCARAVAGWYFDLWGRGTLVTVSS

SEQ ID NO: 31897 - protein, 99 aa, Homo sapiens
VASGFTFSDAWMSWVRQTPGKGLEWIGRIKGRADGWSTEYGAPVKGRFSMSRDDSKNTLYLQLSSLTVEDTGVYYCTTDGVVEAPFDYWGQGTRVTVSS

SEQ ID NO: 31898 - protein, 99 aa, Homo sapiens
AASGFSFDNAWMSWVRQAPGKGLEWVGRIKNKIHGESTEYSAFVGGRFTMSRDDSRSSLYLQMNSLKTEDTAVYYCTTDGVVEAPFDYWGPGTLVTVSS

SEQ ID NO: 31899 - protein, 94 aa, Homo sapiens
AASGFSFSRSGMSWVRQAPGMGLEWVSGVGGSGGSTYYADSVKGRFTISRDDSKDTLYLQMNSLRAEDTAVYYCARGTINLDYWGQGTLVTVSS

SEQ ID NO: 31900 - protein, 93 aa, Homo sapiens
VASGLTFSNHGMSWVRQAPGTGLEWVSGITAGGTSYYADSVKGRFTISRDKSKNTLYLQMNSLRAEDTAIYYCARGTINLDYWGQGTLVTVSS

SEQ ID NO: 31901 - protein, 93 aa, Homo sapiens
TVSGGSISTYSWAWIRQPAGKGLEWIGRISPGGSTNYNPSLKSRVTMSVDTSKNQFSLKLSSVTAADTAVYYCARGSSYWPNWGQGTLVTVSS

SEQ ID NO: 31902 - protein, 93 aa, Homo sapiens
TVSGGSITTYSWTWIRQPAGKELEWVGRIYASGNTDYNPSLKSRLTMSVDTSKNQFSLKLSSVTAADTAVYFCARGSSYWPNWGQGTLVTVSS

SEQ ID NO: 31903 - protein, 99 aa, Homo sapiens
AVYGGSFSAYFLSWIRQPPGKGLEWIGQISHTGRTDYNTSLKSRVTISLDTSKKQFSLKLSSVTAADTALYYCASHCSGGNCYFGFHIWGQGTMVTVSS

SEQ ID NO: 31904 - protein, 98 aa, Homo sapiens
VFGASSGGHYWSWIRQSPEMGLQWIGQIDHGGNAGYNPSLKSRVTYSLDTSKNLLSLTLTSVTDADTAIYYCASHCSGGNCYFGFHIWGQGTAVTVSS

SEQ ID NO: 31905 - protein, 96 aa, Homo sapiens
TVSGASLNREDTYWGWIRQPPGKGLEWIGSLYGSLYSSGRSYYNPSLKSRLTLSVDRSRNQFSLNLRSVTAADTAVYYCVQMAGFWGQGILATVSS

SEQ ID NO: 31906 - protein, 96 aa, Homo sapiens
TVPGASLNREDTYWGWIRQPPGKGLEWIGSLYGSLYSSGRSYYNPSLKSRLTLSVDRSRNQFSLNLRSVTAADTAVYYCVQMAGFWGQGILATVSS

SEQ ID NO: 31907 - protein, 93 aa, Homo sapiens
SVSGGSLRINNDNYWGWVRQSPGKGLEWVGSIYYSGTTYSNPSLKSRVSVSVDTSKNQFFLRLTSVTAADTAVYYCVQMAGFWGQGTLVTVSS

SEQ ID NO: 31908 - protein, 96 aa, Homo sapiens
AASGFTFANAWMNWVRQAPGKGLEWLGRIKLQREGLETNYAAPAKGRFTISRDDSTNTLYLQMNNLKTEDTATYYCTSRIRTTNDNWGQGILVTVS

SEQ ID NO: 31909 - protein, 97 aa, Homo sapiens
AASGFDFTNAWMNWVRQAPGKGLEWIGRILSKSDGETTNSIAPVKGRFTISRDDSKNTLYLQMNSLKIEDTAVYYCTSRIRTTNDNWGQGTLVTVSS

SEQ ID NO: 31910 - protein, 95 aa, Homo sapiens
ASGYTFTSYAMHWVRQAPGEGLEWVGRIHGGSGRTLYSQRFQDRVSITSDTSASIAYMELSSLKSEDTAVYYCTRDAPGGRGDYWGQGTLVTVSS

SEQ ID NO: 31911 - protein, 95 aa, Homo sapiens
ASGYSFTAYAMHWVRQAPGQGLEWLGRVHGGSGNTKYSQKFKGRVTINRDTPASTVYLELKNLTSEDTAVYYCTRDAPGGRGDYWGQGTQVTVSS

SEQ ID NO: 31912 - protein, 100 aa, Homo sapiens
AASGFNFKTFWMSWVRQAPGKGLEWVANIKHDGSDKYYVDSVKGRFTISRDNAKNSFYLQMNSLRAEDTAVYFCAREYDTLTSYYHFDYWGQGTLVTVSS

SEQ ID NO: 31913 - protein, 100 aa, Homo sapiens
AASGFTFNTYWMTWVRQAPGKGLEWVANINHNGSAKFYVDSVKGRFTISRDNAKNSLYLQLNSLRAEDTAVYYCAREYDTLTSYYHFDYWGQGTLVTVSS

SEQ ID NO: 31914 - protein, 93 aa, Homo sapiens
AASGFTFSNYWMSWVRQAPGKGLEWVANIKQDGSEKYYVDSVKGRFTISRDNAKNSLYLQMNSLRVEDTAVYYCARGISCANWGQGTLVTVSS

SEQ ID NO: 31915 - protein, 93 aa, Homo sapiens
AASGFTFSTYWMSWVRQAPGKGLEWVANIKEDGSDKYYVDSVKGRFTISRDNAKNSLYLQMNSLRAEDTAVYYCARGISCANWGQGTLVTVSS

SEQ ID NO: 31916 - protein, 96 aa, Homo sapiens
AASGFTFNIYGMHWVRQAPGKGLEWVAVIWPEGSIQYYGDSVKGRFTISRDNSKKTLFLQMNSLRVEDTAMYYCARHNNVYDWDYWGQGTLVTVSS

SEQ ID NO: 31917 - protein, 96 aa, Homo sapiens
AASGFTFSNYGMHWVRQAPGQGLEWVAVIWPDGSTKYYADSVKGRFTISRDNSRNTLYLQMNSPRAEDTAFYYCARHNNVYDWDYWGQGTLVTVSS

SEQ ID NO: 31918 - protein, 97 aa, Homo sapiens
TVSGGSISSSSYYWGWIRQPPGKGLEWIGNIYYRGSTYYNPSLKSRVTISVDTSKNQFSLKVRSVTAADSAVYYCARDYGDYNFDSWGQGTLVTVSS

SEQ ID NO: 31919 - protein, 97 aa, Homo sapiens
IVSGGSISSSSFYWGWIRQPPGKGLEWIGNIYYSGSTYYNPSLKSRVTISVDTSKSQFSLKLNSVTAADTAVYYCARDYGDYNFDSWGQGTLVTVSS

SEQ ID NO: 31920 - protein, 97 aa, Homo sapiens; identical to SEQ ID NO: 31919

SEQ ID NO: 31921 - protein, 94 aa, Homo sapiens
ASGFTFREYGMHWVRQAPGKGLEWLAIVWYNGNTKYYGDSVKGRFTISRDNYQDRLYLQMNSLRPDDTGIYYCARHQSGYGDYWGQGILVTVSS

SEQ ID NO: 31922 - protein, 95 aa, Homo sapiens
AASGFTFSSYGMHWVRQAPGKGLEWVAIIWYDGGNKYYGESAKGRFTISRDNSKNMLYLQMNNLRAEDTAVYYCARHQSGYGDYWGQGTLVTVSS

SEQ ID NO: 31923 - protein, 91 aa, Homo sapiens
ASGYPFSRSAVNWLRQAPGQRLEWMGWINVADANTRFSGNLQDRVTLTRDTSANTAYMELTSLTSEDTAVYYCASGAFDYWGQGTLVTVSS

SEQ ID NO: 31924 - protein, 91 aa, Homo sapiens
ASGYTFIKSAVEWVRQAPGQRLEWMGWISVGDGSTRYSQKFQDRVTITRDTSATTAYIELSSLTSEDTAVYYCASGAFDYWGQGTQVTVSS

SEQ ID NO: 31925 - protein, 94 aa, Homo sapiens
AASGFTFSNYWMHWVRQAPGKGLVWVSRISGDGIATNYADSVKGRFTISRDNGKNTVYLQMTGLRAEDTAVYYCATVDYRDDYWGQGTLVTVSS

SEQ ID NO: 31926 - protein, 94 aa, Homo sapiens
AVSGFTFTNYWMHWVRQAPGKGLVWVSRISPDGSSPNHADSVEGRFTISRDNTKNMVYLQMNSLRAEDTAVYYCATVDYRDDYWGQGTLVTVSS

SEQ ID NO: 31927 - protein, 96 aa, Homo sapiens
VASGFTFSGSNIHWVRQASGKGLEWVGRIKKRAENYATEYAASVKGRFTLSRDDSKNAAYLQMNSLETEDTAVYYCLSRDSAGGYWGQGTPVTVSS

SEQ ID NO: 31928 - protein, 96 aa, Homo sapiens
AASGFTFSGSTLHWVRQASGKGLEWVGRIRTKANNYATGYAASVKGRFTISRDDSKNTAYLQMNSLTTEDTAVYYCLSRDSAGGYWGQGTLVTVSS

SEQ ID NO: 31929 - protein, 100 aa, Homo sapiens
VSGDSISTNNYWGWIRQAPGKGLECIGSISSSGSTYYNPSLTSRVIISIDTSKNHLSLNLNSVTAADTAVYYCARGYTSGLRVSHWFDPWGQGTLVTVSS

SEQ ID NO: 31930 - protein, 101 aa, Homo sapiens
VSGGSISSTGSYWGWIRQPPGKGLEWIGSISYGGSTYYNPSLQSRVIISVDTCNNQFSLRLSSVTATDTAVYYCARGYTSGLRVSHWFDPWGQGSLVTVSS

SEQ ID NO: 31931 - protein, 94 aa, Homo sapiens
AASGFTFSDFAMIWVRQTPGKGLEWVSSIIYNGDSTYYADSVKGRFTISRDNSNNTLYLQMSSLRAEDTAMYYCAKGEMGVDYWGQGTLVTVSS

SEQ ID NO: 31932 - protein, 92 aa, Homo sapiens
AASGFTFSNYAMNWVRQAPGKGLEWVSSIIWSGGSAYYADSVKGRFTISRDNSKNTLYLQMNNLRAEDTAVYYCAKGEMGVDYWGQGTLVNV

SEQ ID NO: 31933 - protein, 95 aa, Homo sapiens
AASGFTFSTHWMTWVRQAPGKGLEWVANIKQDGSVQHYVDSVKGRFTISRDNAKNSLYLQMNSLSPEDAAVYYCARDYYYYIDVWGKGTTVTVSS

SEQ ID NO: 31934 - protein, 95 aa, Homo sapiens
AASGVSISGYWMGWVRQAPGQGLEWVANINGDGSDKHYVDSVKGRFAISRDNAKNSVYLQLNSLRGEDTAIYFCARDYYYYIDVWGNGTTVTVSS

SEQ ID NO: 31935 - protein, 95 aa, Homo sapiens
AASGLSFSSYWMSWVRQAPGKGLEWVANIKVDGSQQYYVDSVKGRFTISRDNAKNSLYLQMNSLRAEDTAVYYCARGGWSNFDYWGQGTLVTVSS

SEQ ID NO: 31936 - protein, 95 aa, Homo sapiens
AASGAAFSSYWMTWVRQAPGKGLEWVANIKTDGSQKYYVDSVKGRFTISRDNAKNSLYLQMNSLRAEDTAVYYCARGGWSNFDYWGQGTLVTVSS

SEQ ID NO: 31937 - protein, 95 aa, Homo sapiens
AASGVAFSSFWMTWVRQAPGKGLEWVANIKTDGSQKYYVDSVKGRFTISRDNAKNSLYLQMNSLRAEDTAVYYCARGGWSNFDYWGQGTLVTVSS

SEQ ID NO: 31938 - protein, 103 aa, Homo sapiens
AASGFTFSTNAMSWVRQAPGKGLEWVSGFRSSGSVTYYADSVKGRFTISRDISKNTLYLQMNSLRAEDTALYYCAKHIVAAGRSYYYYGMDVWGQGTTVTVSS

SEQ ID NO: 31939 - protein, 103 aa, Homo sapiens
AASGFNFRSYAMSWVRQTPGKGLEWVSSISGSGGSTFYADSVKGRFTISRDNSKNTVYLQMNSLRAEDTAVYYCAKHIVAAGRSYYYYGMDVWGQGTTVTVSS

SEQ ID NO: 31940 - protein, 93 aa, Homo sapiens
AASGFTLSNYEMNWVRQAPGKGLEWVSYISSGGSATYYADSVKGRFTISKDVPNNSLYLQMNSLRVDDTAVYYCARSYRMDVWGQGTTVTVSS

SEQ ID NO: 31941 - protein, 93 aa, Homo sapiens
AASGFTFSSHSMNWVRQAPGKGLEWFSYSSSGSGTIYYADSVKGRFTISRDNAKNSLYLQMSSLRAEDTAVYYCARSYRMDVWGQGTTVSVSS

SEQ ID NO: 31942 - protein, 100 aa, Homo sapiens
AASGFTFSSYAIHWVRQAPGKGLEWVAVISYDGSIKYYADSVKGRFTMSRDNSKNTLYLQVNSLRAEDTAVYYCARVGGTYFYYYGMDVWGQGTTVTVSS

SEQ ID NO: 31943 - protein, 100 aa, Homo sapiens
VVSGFTFSSYAIHWVRQAPGKGLEWVAVISSDGSYKYYADSVKGRITVSRDNSKDTLYLQMNSLRAEDTAVYYCARVGGTYFYYYGMDVWGQGTTVTVSS

SEQ ID NO: 31944 - protein, 98 aa, Homo sapiens
VASDLTLSSSLVHWVRQAPGKGLEWVALSPHDERLERYVDSVKGRFTVSRDNSKNTVYLQMDSLRVEDTAVYYCARGLSGHGPSFEHWGQGTLVTVSS

SEQ ID NO: 31945 - protein, 98 aa, Homo sapiens
VASDLTLSSSLVRWVRQAPGKGLEWVALSPHDERLERYVDSVKGRFTVSRDNSKNTVYLQMDSLRVEDTAVYYCARGLSGHGPSFEHWGQGTLVTVSS

SEQ ID NO: 31946 - protein, 98 aa, Homo sapiens
VASDLTLSSSLVRWVRQAPGKGLEWVALSPHDERLEHYVDSVKGRFTVSRDNSKNTVYLQMDSLRVEDTAVYYCARGLSGHGPSFEHWGQGTLVTVSS

SEQ ID NO: 31947 - protein, 92 aa, Homo sapiens
AASGFDFSNDWMHWVRQVSGKGLAWISRINSDGSLITYADSVKGRFTISRDNAKNTLYLQMNSLRAEDTAVYYCVRGLGDGWGQGTLVTVFS

SEQ ID NO: 31948 - protein, 92 aa, Homo sapiens; identical to SEQ ID NO: 31947

SEQ ID NO: 31949 - protein, 92 aa, Homo sapiens
AASRFTFSKYWMHWVRQVPGKGLVWVSRINGDGTLTTYADSVKGRFTISRDNAKNTLSLQMNSLRDDDTALYYCVRGLGDGWGQGTLVTVSS

SEQ ID NO: 31950 - protein, 95 aa, Homo sapiens
VSGFTFSDYWMSWVRQAPGKGLEWVANTKDDGSDKYYVDSVKGRFTISRDNAKNSLYLQMNSLRVEDTAVYYCARVIAWGWFDPWGQGTLVTVSS

SEQ ID NO: 31951 - protein, 96 aa, Homo sapiens
VASGFSFSSYWMSWLRQASGKGLEWVAKIDKEGSDKSYGDSVKGRFTISRDNARNSLYLQMNSLRAEDTAVYYCARVIAWGWFDPWGQGTLVTVSS

SEQ ID NO: 31952 - protein, 94 aa, Homo sapiens
ASGYTFTNYPIHWVRQAPGQRLEWMAWIITGDGNTKYSQKFQGRVSITRDTSASTVYMEVSSLKYEDTAVYYCARRGEGYKYDYWGQGTLVTVS

SEQ ID NO: 31953 - protein, 94 aa, Homo sapiens
SGYTFTNYPLHWVRQAPGQRLEYMGWIITGDGHTKYSQKFQGRVTLLRDTSASTAFMELRSLTYEDTAMYYCARRGEGYKYDYWGQGTLVTVSS

SEQ ID NO: 31954 - protein, 93 aa, Homo sapiens
VASGFTFTTYWMGWVRQAPGKGLEWVANTKQDGSEKNYVDSVKGRFTISRDNAKNSVYLQMNNLRGEDTAVYYCARGNWFAGRGQGTLVTVSS

SEQ ID NO: 31955 - protein, 93 aa, Homo sapiens
AASGFTFTDYYMGWVRQAPGKGLEWVANTKQDGSEKYYVDSVRGRFTIARDNAERSLYLQMNSLRAEDTAVYYCARGNWFAGGGQGTLVIVSS

SEQ ID NO: 31956 - protein, 95 aa, Homo sapiens
AASGFTFSSYWMRWVRQAPGKGLQWVADIKQDGGWTNYVDSVKGRFTISRDNAQNSLYLQMNSLRAEDTAVYYCARGGIWSFDYWGQGTLVTVSS

SEQ ID NO: 31957 - protein, 95 aa, Homo sapiens; identical to SEQ ID NO: 31956

SEQ ID NO: 31958 - protein, 95 aa, Homo sapiens
AASGFTFSTSWMDWLRQAPGKGLEWVANINPDGSRDYYVDSVKGRFTISRDNTKNSLFLQMNSLRAEDTALYYCARGGIWSFDYWGQGILVTVSS

SEQ ID NO: 31959 - protein, 96 aa, Homo sapiens
AASEFIFSRFTMSWVRQAPGKGLEWVSAISGSGIDTHYADSVKGRFTISRDNSKNTLYLQINSLRAEDTAVFYCAKHYSYYYMDVWGKGTTVTVSS

SEQ ID NO: 31960 - protein, 96 aa, Homo sapiens
AASGFTFSSYAMSWVRQAPGKGLEWVSGISGDGLRTYYGDSVKGRFTITRDNSKNTVHLQMNSLRAEDTALYFCAKHYSYYYMDVWGKGTTVTVSS

SEQ ID NO: 31961 - protein, 93 aa, Homo sapiens
AGSGFTFSSYWMHWVRQAPGKGLVCLSRTNVDGSATIYADSVKGRFTISRDNAKNTLWLQMNSLGAEDTAVYYCARGRSMDVWGKGTTVTVSS

SEQ ID NO: 31962 - protein, 93 aa, Homo sapiens
AASGFTFSSYWMHWVRQAPGKGLVWVSRIYTDGSSTTYADSVRGRFTISRDNAKNTLYLQMNSLRAEDTAVYYCARGRSMDVWGQGTTVTVSS

SEQ ID NO: 31963 - protein, 94 aa, Homo sapiens
AASGFTFTNSAMTWVRQAPGKGLEWVSVISDSGGNTYYADSVKGRFTISRDNSKNTLYLQMNSLRDEDTAVYYCAKGGAWLDPWGQGTLVTVSS

SEQ ID NO: 31964 - protein, 94 aa, Homo sapiens
AASGFSFSSHGMTWVRQAPGKGLEWISVITGNGVTTNYADFVRGRFTISRDNSKDTVYLQMDSLRAEDTAVYYCAKGGAWLDPWGQGTLVTVSS

SEQ ID NO: 31965 - protein, 99 aa, Homo sapiens
EASGFIFSGYSMNWLRQAPGRGLEWVSIVYRDGATRYYADSVKGRFTISRDNSRDRVYLQMNNLRAEDTGIYYCAKDREPDYRFDIDYWGHGTLVTVSS

SEQ ID NO: 31966 - protein, 99 aa, Homo sapiens
AASGFTFSSYSMNWVRQAPGKGLEWVSIIYGSGGTIYYADSVRGRFTISRDNSKNTLYLQMTSLRAEDTAVYYCAKDREPDYRFDIDYWGQGTLVIVSS

SEQ ID NO: 31967 - protein, 96 aa, Homo sapiens
VASGFTFKNFAMSWVRQAPGKGLEWVSTINDKADKTYYADSVKGRFTISRDNSKNTLYLQTNGLRVEDTAVYYCAKFGSGWSLDYWGQGTLVTVSS

SEQ ID NO: 31968 - protein, 96 aa, Homo sapiens
AASGFISSSYGMSWVRQAPGKGLEWVSLIHSGVAGTKYVDSVKGRFTISRDDSKNTIHLEMNSLRADDTAVYYCAKFGSGWSLDYWGQGTLVTVSS

SEQ ID NO: 31969 - protein, 93 aa, Homo sapiens
TVSGGSISRYYWSWIRQPPGKGLEWIGYINYSGSTNYNPSLKGRVTISIDTSKNQFSLQLSSVTAADTAVYYCARGGGYNAYWGPGTLVTVSS

SEQ ID NO: 31970 - protein, 93 aa, Homo sapiens
TVSGGSIGTNFWNWIRQPPGKGLEWIGYINYSGSTNYNPSLKSRVTISVDTSKNQFSLKLNSVTAADTAVYYCARGGGYNAYWGQGTLVTVSS

SEQ ID NO: 31971 - protein, 96 aa, Homo sapiens
VASGFSFSAYGMHWLRQAPGRGLEWVGVIWNDGGDKYYADSVKGRFTFSRDNSKSTLYLQMDSLRVEDTAVYYCARDSGISSAAYWGQGTLVIVSS

SEQ ID NO: 31972 - protein, 96 aa, Homo sapiens
AASDFIFNNYGIHWLRQAPGKGLEWMAVMWNDGSRQYYADSVRGRFSVSRDSSKNMVYLQLNNLRDEDTAVYYCARDSGISSAAYWGRGTQVIVSS

SEQ ID NO: 31973 - protein, 96 aa, Homo sapiens
AVSGFSLSDHYMDWVRQAPGKGLEWVGRTRPKAGRYTTEYAASVKGRFIVSRDESKNSLYLQMNSLKTEDTAMYYCARGKNSFDSWGQGTLVTVSS

SEQ ID NO: 31974 - protein, 96 aa, Homo sapiens
AASGFTLSDHYMDWVRQAPGEGLEWIGRSTNKATSYTTIYAASVKGRFTISRDDSKNSLYLQMNSLKTEDTAVYFCARGKNSFDSWGQGAPVTVSS

SEQ ID NO: 31975 - protein, 96 aa, Homo sapiens
AASGFTFSNYAMTWVRQAPGRGLEWVSTIRKSGDGAYYADSVTGRLTLSRDNSKNTLYLQMNSLRAEDTAVYYCAKGGLWGGMDVWGQGTTVTVSS

SEQ ID NO: 31976 - protein, 94 aa, Homo sapiens
SGFTFNDYAINWVRQAPGKGLEWVSGISGSGGSTYYADSVKGRFTISRDNSKNTLYLQMNSLRAEDTAVYYCAKGGLWGGMDVWGQGTTVTVSS

SEQ ID NO: 31977 - protein, 99 aa, Homo sapiens
AASAFTFSNAPMHWVRQAPGKGLEWVAVIHPDGGAQAYIDSVRGRFSISRDNSKSTLYLQMNGLRLEDTALYYCAKEGRSSGRAGACNVWGQGTMVTVS

SEQ ID NO: 31978 - protein, 100 aa, Homo sapiens
AASAFTFSNAPMHWVRQAPGKGLEWVAVIHPDGGAQAYIDSVRGRFSISRDNSKSTLYLQMNGLRLEDTALYYCAKEGRSSGRAGACNVWGQGTMVTVSS

SEQ ID NO: 31979 - protein, 102 aa, Homo sapiens
TVSGGSVSNSFYYWTWIRQPAGKTLEWIGRIYTSGSTNYNPSLKSRVTISVDTSNNQFSLILSSVTAADTAVYYCARASYCGGDCYSWFDPWGQGTLVTVSS

SEQ ID NO: 31980 - protein, 102 aa, Homo sapiens
TVSGGSISSGTDYWSWLRQPAGKGLEWIGRIYTSGNTNYNPSLKSRVTISADTSKNQFSLKLSSVAAADTAVYYCARASYCGGDCYSWFDPWGQGTLVTVSS

SEQ ID NO: 31981 - protein, 92 aa, Homo sapiens
AASGFIFSNAWMSWVRQAPGKGLEWVGRIKSKTGGGIIEYTAPVKGRFTISRDDSKNTLYLEMNSLKTEDTAVYYCTTLGTWGQGALVTVSS

SEQ ID NO: 31982 - protein, 92 aa, Homo sapiens
AASGLTFSNAWMSWVRQPPGKGLEWVGRIKSKIVGGTIEYTPPVTGRFTISRDDAKNTVYLEMNSLKTEDTAVYYCTTLGTWGQGTLVTVSS

SEQ ID NO: 31983 - protein, 94 aa, Homo sapiens
AASGFTFSSYWMTWVRQAPGKGLEWVANIKQDGSEKYYVDSVKGRFTIARDNAKNSLYLQMNSLRAEDTAVYYCARGQRGMDVWGQGTTVTVSS

SEQ ID NO: 31984 - protein, 94 aa, Homo sapiens
AASGLTFRSYWMTWVRQAPGKGLEWVANIKQDGSEKYYVDSVKGRFTISRDNAKKSLYLQMNSLRPEDTAVYYCARGQRGMDVWGQGTTVTVSS

SEQ ID NO: 31985 - protein, 94 aa, Homo sapiens
AASGFTFSSYWVTWVRQAPGKGLEWVANIKQDGSEKHYVDSVKGRFTISRDNAKNSLYLQMNSLRAEDTAVYYCARGQRGMDVWGQGTTVTVSS

SEQ ID NO: 31986 - protein, 94 aa, Homo sapiens
AASGFTFRTYWMHWVRQAPGKGLVWVSRINSDGSSTSYADSVKGRFTISRDNAKNTLYLQMNSLRAEDTAVYYCARGGYRVDVWGQGTTVTVSS

SEQ ID NO: 31987 - protein, 94 aa, Homo sapiens
AASGFTFSTSWMHWVRQVPGKGLVWVSHIKNDGTTTIYEESVKGRFTISRDNAKNTLYLQMNSLRAEDTGVYYCARGGYRVDVWGVGTAVTVSS

SEQ ID NO: 31988 - protein, 92 aa, Homo sapiens
AASGFTFSSYEMNRVRQAPGKELEWVSYISSSGITIYYADSVKGRFTISRDNAKNSLYLQMNSLRAEDTAVYYCARVGLAYWGQGTLVTVSS

SEQ ID NO: 31989 - protein, 92 aa, Homo sapiens
AASGFTFSGYEMNWVRQAPGKGLEWVCNIGTSGGPIYYADSVKGRFTISRDDAKKSLYLQMDSLRGEDTAIYYCARVGLAYWGQGALVTVSS

SEQ ID NO: 31990 - protein, 90 aa, Homo sapiens
AASGFTFSSYGMHWVRQAPGKGLEWVAVIWYDGSNKYYADSVKGRFTISRDNSKNTLHLQMNSLRAEDTAVYYCSCFEYWGQGTLVTVSS

SEQ ID NO: 31991 - protein, 90 aa, Homo sapiens
EASGFIFNKYGMHWVRQAPGRGLEWVAVIWSDGIRKEYAESVKGRFTISRDNSKNTLYLQVNSLRSEDTAVYYCSCFEYWGQGTLVTVSS

SEQ ID NO: 31992 - protein, 94 aa, Homo sapiens
AASGFTLGTYWMSWVRQAPGKGLEWVAKIKQDGSEKYYVDSVKGRFTISRDNAKNSLYLQMNSLRAEDTAVYYCARGTGWYFYWGQGTLVTVSS

SEQ ID NO: 31993 - protein, 94 aa, Homo sapiens
AASGFTFSTYWMSWVRQAPGKGLEWVASIKQNGSEKYSVDSVKGRFTISRDNAKNSLYLQMNSLRAEDTAVYYCARGTGWYFYWGQGTLVTVSS

SEQ ID NO: 31994 - protein, 92 aa, Homo sapiens
TVSGGSISSGSYYWSWIRQPAGKGLEWIGRIYTSGSTNYNPSLKSRVTISVDTSKNEFSLKLSSVTAADTAVYYCARKFDVWGRGTLVTVSS

SEQ ID NO: 31995 - protein, 92 aa, Homo sapiens
TVSGFSVSSGGYYWSWIRQAPGEGLEWIGHIYYSGSTNYNPSLKSRVTISVDTSKNQFSLKLTSVTAADTAVYYCARKFDVWGRGTLVTVSS

SEQ ID NO: 31996 - protein, 97 aa, Homo sapiens
ISGDSVSSNSVTWNWIRQSPSRGLEWLGRTYYRSKWEINYAVSVKGRVTINSDTSRNQISLQLNSVTPEDTAVYYCARATGGIFDYWGQGTLVTASS

SEQ ID NO: 31997 - protein, 97 aa, Homo sapiens
ISGDSVSSNSATWNWIRQSPSGGLEWLGRTYYRSKWSNDYAVSVKSRITINADTSKNQFSLQLNSMTPEDTAIYYCARATGGIFDYWGQGTLVTVSS

SEQ ID NO: 31998 - protein, 96 aa, Homo sapiens
AASGFTFSTFGMHWVRQAPGKGLEWVAVISYDGSNKYYADSVKGRFTISRDNSKNMLYLQMNSLRPEDTAVYYCARVPSGSYFDYWGQGTLVTVSS

SEQ ID NO: 31999 - protein, 96 aa, Homo sapiens
AASGFTFSSYGMHWVRQAPGKGLEWLAVISYDGKNKYYIDSVKGRFTISRDNSKNTLYLQMNSLRAEDTAMYYCARVPSGSYFDYWGQGTLVTVSS

SEQ ID NO: 32000 - protein, 94 aa, Homo sapiens
AASGFTFTNSAMNWVRQAPGKGLEWVSCITRSGGDTFYADSVKGRFTISRDNSENTVYLQMNSLRAEDTALYYCAKRGDYFDSWGQGILVTVPS

SEQ ID NO: 32001 - protein, 94 aa, Homo sapiens
AASGFTFSTYAMSWVRQAPGKGLEWVSVIYSGDSSTYYADSVKGRFTISRDNSKSTLYLQMNSLRAEDTAIYYCAKRGDYFDSWGQGTLVTVSS

SEQ ID NO: 32002 - protein, 95 aa, Homo sapiens
AASGFTFNTYAVHWVRQAPGKGLEWVAVISYDGSNKYYAYSVKGRFTISRDNSKNTLYLQMNSLRAEDTAVYHCARLVAAAFDYWGQGTLVTVSS

SEQ ID NO: 32003 - protein, 95 aa, Homo sapiens
AASVFTFSSYAMHWVRQAPGKGLEWVAVISYDGSNKYYADSVKGRFTISRDNSKNTLYLQMNSLRAEDTAVYHCARLVAAAFDYWGQGTLVTVSS

SEQ ID NO: 32004 - protein, 90 aa, Homo sapiens
AASGFTFSSYGIHWVRQAPGRGLEWLAVISYDGGNDYYADSVKGRFTVSRDNSRYNLYLQMNSLTAEDTAVYYCSTFDYWGQGTLVTVSS

SEQ ID NO: 32005 - protein, 90 aa, Homo sapiens
AASGFTFSSYGVHWVRQAPSKGLEWVAVISHDGSNKEYEDSVKGRFTISRDNSKNTLYLQMNSLRAEDTAVYYCSTFDYWGQGTLVTVSS

SEQ ID NO: 32006 - protein, 98 aa, Homo sapiens
TVSGGSISNYYWSWFRQPAGKGLEWIGRIYSTGSTAYNPSLKTRVTMSVDTSENQFSLRLHSVTAADTAVYYCARGAATGSGNWFDPWGQGTLVTVSS

SEQ ID NO: 32007 - protein, 98 aa, Homo sapiens
TVSGGSINNYYWSWFRQPAGKRLEWIGRVYTSGATSYNPSLKSRVTMSVDTSKKQLSLELTSVTAADTAVYYCARGAATGSGNWFDPWGQGTLVTVSS

SEQ ID NO: 32008 - protein, 102 aa, Homo sapiens
KGSGYRFTSNWISWVRQMPGKGLEWMGRIDPTDSYTNYSPSFQGHVTISVDESIDTAYLQWGSLKASDTAIYYCARADPTRGIPYYYGMDVWGQGTAVTVSS

SEQ ID NO: 32009 - protein, 102 aa, Homo sapiens
KGSGYSFTNYWISWVRQMPGKGLEWMGRIDPSDSYTKYSPSFQGHVTISADKSISTAYLQWSSLKASDTAIYYCARADPTRGIPYYYGMDVWGQGTTVTVAS

SEQ ID NO: 32010 - protein, 98 aa, Homo sapiens
AASGFLFRTYGMHWVRQAPGKGLDWVAVISNDGGRKHYGDSVKGRFTISRDNSNNMLYLQMDSLRPEDTAVYYCVKDRVTEAYGMEVWGQGTTVTVSS

SEQ ID NO: 32011 - protein, 98 aa, Homo sapiens
AASGFPFSRSGMHWVRQAPGKGLEWVAVIRNDGSRQFYGDSVKGRFTISRDNSKNMVFLQMNSLRLEDTAVYYCVKDRVTEAYGMEVWGQGTTVSVSS

SEQ ID NO: 32012 - protein, 102 aa, Homo sapiens
EASGITVSDAWMNWVRQVPGRGLEWVGRVKDKLNGGRTDYAAPVKGRFTVSRDDSKNTLYLQMNSLKTEDTAVYYCATDDYYASGTYFFDFWGQGTLVTVSS

SEQ ID NO: 32013 - protein, 102 aa, Homo sapiens
AASGFTFSNAWMNWVRQAPGKGLEWVGRIKRKIDGGTTDYAAPVKGRFTISRDDSKNTLYLQMNSLRTEDTAVYYCATDDYYASGTYFFDFWGQGTLVTVSS

SEQ ID NO: 32014 - protein, 100 aa, Homo sapiens
AASGFSFSSHGMHWVRQAPGKGLEWVAMMSYVGTSEFYIDSVKGRFTISRDNSKNTLYLQMNSLRTEDTAVYYCAKDLYDNGWYNYFDPWGQGTLVIVSS

SEQ ID NO: 32015 - protein, 100 aa, Homo sapiens
AASGFTLNNCGMHWVRQAPGKGLEWVAMISYDGRSEYYADSVKGRFTISRDNSKNTLYLQMTNLRPEDTAIYYCAKDLYDNGWYNYFDPWGQGTLVTVSS

SEQ ID NO: 32016 - protein, 98 aa, Homo sapiens
ASGYTFTSYAVNWVRQAPGQGLEWMGWINTNTGNPTYAQGFTGRFVFSLDTSVSTAYLQISSLKAEDTAMYYCARGLRYGSGSYYDYWGQGTLVTVSS

SEQ ID NO: 32017 - protein, 98 aa, Homo sapiens
ASGYTFTNYAINWVRQAPGPGLEWMGWINTNTGNPTYAQGFTGRFVFSLDTSVNTAYLQISSLKAEDTAVYYCARGLRYGSGSYYDYWGQGTLVTVSS

SEQ ID NO: 32018 - protein, 96 aa, Homo sapiens
KVSRYSFSSYWIAWVRQMPGKGLEWMGIIYPGDSNIRYRPSFQGQVTISADKSISTAYLQWRSLKASDTAIYYCASGGSGSHIDYWGRGTLVTVSS

SEQ ID NO: 32019 - protein, 96 aa, Homo sapiens
KGSGYSFTSHWIGWVRQMPGKGLEWMGIIYPGDSDTRYSPSFQGQVTISVDKSISTAYVQWSSLKASDTAMYYCASGGSGSHIDYWGQGTLVTVSS

SEQ ID NO: 32020 - protein, 99 aa, Homo sapiens
AASGFTFGSYGMHWVRQAPGKGLEWVAVIWFDGSNKYYADSVKGRFAISRDNSKNTLSLQMNSLRAEDTAVYYCARDGGFSGYAYFDYWGQGTLVTVSS

SEQ ID NO: 32021 - protein, 99 aa, Homo sapiens
VASGFTFSSYGMHWVRQAPGKGLEWVAVIWFDGSNKYYADSVKGRFTISRDYSKNTLYLQMNSLRAEDTAVYYCARDGGFSGYAYFDYWGQGTLVTVSS

SEQ ID NO: 32022 - protein, 112 aa, Homo sapiens
AASGFSFSNYVMSWVRQAPGKGLEWVSGISGSGGSGGNTYYADSVRGRFTISRDNSKNTLHLQMNSLRAEDTAVYYCAKVWGGYCSGITCYSPYYYYGMDVWGQGTTVTVSS

SEQ ID NO: 32023 - protein, 109 aa, Homo sapiens
AASGFTFTSYVMSWVRQAPGKGLEWVSSMSGRGGDTYYADSVKGRFTISRDTSKNTLYLQMNSLRGEDTAVYYCAKVWGGYCSGITCYSPYYYYGMDVWGQGTTVAVSS

SEQ ID NO: 32024 - protein, 92 aa, Homo sapiens
ASGFIFSSYTMNWVRQAPGKGLEWVSSISSSGSYIYYGDSVKGRFTISRDNAKNSLYLHMNSLRVEDTAVYYCARSDGLDVWGQGTTVTVSS

SEQ ID NO: 32025 - protein, 93 aa, Homo sapiens
AASGFTFSSYTMHWVRQTPGKGLEWVASITNTGVYINYADSVKGRFSISRDNAEKSLSLHMNGLTADDTAIYFCARSDGLDVWGQGNTVTVSS

SEQ ID NO: 32026 - protein, 96 aa, Homo sapiens
VASGFTFSTYWMSWVRQAPGKGLEWVANINQDGNGKYYVDSVKGRFTVSRDNAKNSLYLQMNSLRVEDTAVYYCARALGLPDFDFWGQGTLLTVSS

SEQ ID NO: 32027 - protein, 96 aa, Homo sapiens; identical to SEQ ID NO: 32026

SEQ ID NO: 32028 - protein, 96 aa, Homo sapiens
AASGFTFSRYWMSWVRQTPGKGLEWVANIKHDGSEKYYVDSVKGRFSVSRDNAKNSLYLQMHSLRAEDTAVYYCARALGLPDFDFWGQGTLVTVSS

SEQ ID NO: 32029 - protein, 91 aa, Homo sapiens
AASGFTFSSYWMSWVRQAPGKGLEWVANTKPDGSDKYYEPSVEGRFTISRDNAKNSVYLQMNSLRVEDTAVYYCAAGLGYWGQGTLVTVSS

SEQ ID NO: 32030 - protein, 90 aa, Homo sapiens
AASGFTFSSYWMTWVRQAPGKGLEWVATIKPDGSDKWFVDSVKGRFTISRDNAQNSVYLQMNSLRAEDTAVYYCAAGLGYWGQGTLVTVS

SEQ ID NO: 32031 - protein, 93 aa, Homo sapiens
AVSGFTFTGHDMSWVRQAPEKGLEWVSTIRGSGSPTYYADSVKGRFTISRDDSKNTLYLQMTSLRVEDTAIYYCVKGSWIDYFGQGTLVTVSS

SEQ ID NO: 32032 - protein, 92 aa, Homo sapiens
AASGFPFTTYDMTWVRQAPGKGLEWVSVIIGRDGRTYYADSVKGRFTISRDNSENTLYLQMNSLRAEDTAIYYCVKGSWIDYWGPGTLVTVS

SEQ ID NO: 32033 - protein, 98 aa, Homo sapiens
TVSGGSINGAGYHWSWIRQHPGKGLEYIGHINYGGSTYYNPSLRSRLTISLDTSENQYSLRLTSVTAADTAVYYCATYYEGVGGRGDWGQGTLVTVSS

SEQ ID NO: 32034 - protein, 98 aa, Homo sapiens
TVSGGSISSRGYHWTWIRQRPGKGLEWIGQIHVDGNFYYSPSLKSRVTVSKDVSKNQFSLRLNSVTDADTAVYYCATYYEGVGGRGDWGQGTLVTVSS

SEQ ID NO: 32035 - protein, 94 aa, Homo sapiens
ASGFIFSKNAMAWVRQGPGKGLEWVSSIGSDDNTYYADSVKGRFTTSRDTSKNTLFLQMNSLSAEDTAIYYCAKDIYRWSFDYWGQGILVTVSS

SEQ ID NO: 32036 - protein, 95 aa, Homo sapiens
ASGFNLWSNAMTWVRRSPGKGLEWVAAINGGNDDTNYADSVKGRFTISRDNSKNILYLQMNSLRAEDTAIYYCAKDIYRWSFDYWGQGAQVTVSS

SEQ ID NO: 32037 - protein, 95 aa, Homo sapiens
ASGFDLWSNAMTWVRRSPGKGLEWVAAINGGNDDTNYADSVKGRFTISRDNSKNILYLQMNSLRAEDTAIYYCAKDIYRWSFDYWGQGVQVTVSS

SEQ ID NO: 32038 - protein, 94 aa, Homo sapiens
AASGFTFSSYWMHWVRQAPGKGLVWVSRINDGGGSTTYADSVKGRFTISRDNAKNTLYLQMNSLRAEDTAVYYCARGRYGDNYWGQGTLVTVSS

SEQ ID NO: 32039 - protein, 94 aa, Homo sapiens
AASGFTFSSYWMHWVRQAPGKGLVWLSRINSDGGSTTYAESVKGRFTISRDNAKNTLYLQMNSLRAEDTAVYYCARGRYGDNYWGQGTLVTVSS

SEQ ID NO: 32040 - protein, 96 aa, Homo sapiens
AASEFAFSGYWMSWVRQAPGKGLEWVANIKQDESEKYYLDSVKGRFTISRDNAKNSLYLQMNSLGAEDTALYFCARDVGGGFFDYWGRGTLVTVSS

SEQ ID NO: 32041 - protein, 96 aa, Homo sapiens
AASGFSFRSHWMTWLRQTPGKRPEWVANINQDGSVTNYIDSVGGRFTISRDNAKTSVYLQMNSLRAEDTAVYYCARDVGGGFFDYWGQGTLVTVSS

SEQ ID NO: 32042 - protein, 95 aa, Homo sapiens
ASGFSFRSHWMTWLRQTPGKRPEWVANINQDGSVTNYIDSVGGRFTISRDNAKTSVYLQMNSLRAEDTAVYYCARDVGGGFFDYWGQGTLVTVSS

SEQ ID NO: 32043 - protein, 96 aa, Homo sapiens; identical to SEQ ID NO: 32041

SEQ ID NO: 32044 - protein, 96 aa, Homo sapiens
AASGFSFRSHWMTWLRQTPGKRPERVANINQDGSVTNYIDSVGGRFTISRDNAKTSVYLQMNSLRAEDTAVYYCARDVGGGFFDYWGQGTLVTVSS

SEQ ID NO: 32045 - protein, 98 aa, Homo sapiens
ASGFTFSSYGMHWVRQAPGKGLEWVAVIWFDGRNKYYADSVKGRVTISRDNSKNTLSMQMNSLRAEDTAVYYCAREGIVGTTTGLDSWGRGTLVTVSS

SEQ ID NO: 32046 - protein, 99 aa, Homo sapiens
VASGFTFSNYGMHWVRQAPGKGLEWVSLIYHDGSNKYYADSVKGRFTISRDNSKNTLYLQMDSLRAEDTAMYYCAREGIVGTTTGLDSWGQGTLVTVSS

SEQ ID NO: 32047 - protein, 99 aa, Homo sapiens
AASGFTFSNYGMHWVRQAPGKGLEWVAVVWHDGNNKYYADSVKGRFTISRDSSKNMVYLQMNSLRAEDTAVYYCAREGIVGTTTGLDSWGQGTLVTVSS

SEQ ID NO: 32048 - protein, 98 aa, Homo sapiens
AASGFTFDDYAMSWVRQGPGKGLEWVSGINWNGGNTAYADSVKGRFTISRDNAKNSLYLQMSSLRAEDTALYYCARGYSSGLYYFDYWGQGTLVTVSS

SEQ ID NO: 32049 - protein, 98 aa, Homo sapiens
AASGFTFGDYGMSWVRQAPGKGLEWVSGINWNGGSTGYADSVKGRFTISRDNAKNSLYLQMNSLRAEDTALYYCARGYSSGLYYFDYWGQGTLVTVSS

SEQ ID NO: 32050 - protein, 96 aa, Homo sapiens
AVSGFTFSDYWMHWVRQGPGEGLMWVSEINSEGTTTAYAVSVRGRFTVSRDNAGNTLILQMNGLRVEDTAMYYCVRGTRGTSGVDYWGQGTLVTVS

SEQ ID NO: 32051 - protein, 96 aa, Homo sapiens
ASGFTFGDYWMHWVRLVPGKGLLWVSRLSGSGWTKSYVDSVKGRFYISRDNAKNTVFLQMNTLRAEDTAIYYCVRGTRGTSGVDYWGQGALVSVSS

SEQ ID NO: 32052 - protein, 92 aa, Homo sapiens
AASGFTFSNAWMSWVRQAPGKGLEWVGRIKSNTDGGTTDYAAPVKGRFTISRDDSKSTLYLQMNSLKTGDTAVYYCSRMDVWGQGTTVTVSS

SEQ ID NO: 32053 - protein, 92 aa, Homo sapiens
AVSGFTLSNAWMSWVRQPAGKGLEWVGRIRSKTDGGTTEYAPLVKGRFTISRDDSQNTLYLQMNSLKTEDTAVYYCSRMDVWGQGTTVTVSS

SEQ ID NO: 32054 - protein, 96 aa, Homo sapiens
AASGFTFTTYAMSWVRQAPGKGLEWVSAISGRSGSTNYADSVKGRFTTSRDNSNNTVFLQMNSLRAEDTAVYYCAKDYGGIPFDHWGQGTLVTVSS

SEQ ID NO: 32055 - protein, 96 aa, Homo sapiens
AASGFTFSVYAMSWVRQAPGKGLEWVSAISGSGGSTNYADSVRGRFTISRDNSKNTLYLQMSSLTAEDTALYYCAKDYGGIPFDHWGQGTLVTVSS

SEQ ID NO: 32056 - protein, 92 aa, Homo sapiens
AASGFTFSSAWMNWVRQAPGKGLEWVANIKLANEKFYVDSVKGRFTISRDNAKSSLYLQMNSLRAEDTAVYYCARDRGSGYWGQGTLVTVSS

SEQ ID NO: 32057 - protein, 92 aa, Homo sapiens
AASGFTFSSAWMNWVRQAPGKGLEWVANIKLANEKFYVDSVKGRFTISRDNAKSSLYLQMNSLRAEDMAVYYCARDRGSGYWGQGTLVTVSS

SEQ ID NO: 32058 - protein, 93 aa, Homo sapiens
AASGFTFSSCWMTWVRQGAGKGLEWVANIKQDGSEKHYVDSVKGRFTISRDNAKNLLYLQMDSLRAEDTAIYYCARDRGSGYWGQGTLVTVSS

SEQ ID NO: 32059 - protein, 93 aa, Homo sapiens
AASGFTFSSSCMNWVRQAPGKGLEWVANIKQDGSEKYYVDSVKGRFTISRDNAQNSLYLQMNSLRAEDTAVYYCARDRGSGYWGQGTLVTVSS

SEQ ID NO: 32060 - protein, 95 aa, Homo sapiens
AASGFTFNSHWMNWVRQAPGKGLEWVANIKEDGSVKVYVDSVKGRFTISRENANNSVYLQMNSLRAEDTAVYHCVRGSGWVFDYWGQGTLVTVSS

SEQ ID NO: 32061 - protein, 95 aa, Homo sapiens; identical to SEQ ID NO: 32060

SEQ ID NO: 32062 - protein, 95 aa, Homo sapiens
AASGFTFNSHWMNWVRQAPGKGLEWVANIKEDGSVKVYVDSVKGRFTIFRENANNSVYLQMNSLRAEDTAVYHCVRGSGWVFDYWGQGTLVTVSS

SEQ ID NO: 32063 - protein, 95 aa, Homo sapiens; identical to SEQ ID NO: 32060

SEQ ID NO: 32064 - protein, 95 aa, Homo sapiens
ATSGFTFSSRSMHWVRQAPGKGLEWVANIGQDGSEKYYVDSVKGRFTISRDNGKNSLSLQMNSLRAEDTALYRCVRGSGWVFDYWGQGTQVTVSS

SEQ ID NO: 32065 - protein, 89 aa, Homo sapiens
TSGLIFSHYNIHWVRQAPGKGLEWVALIYYDGTTKYYADSVKGRFTISRDNSKNTLYLQMNDLRAEDTAVYRCSNYEYWGQGTLVTVSS

SEQ ID NO: 32066 - protein, 89 aa, Homo sapiens; identical to SEQ ID NO: 32065

SEQ ID NO: 32067 - protein, 90 aa, Homo sapiens
AASGFRFNNYGMHWVRQVPGKGLEWMTLISYDGSNKYYVDSVKGRFTVSRDNSKKTLYLEMNSLRVEDTAVYYCSNYEYWGQGTLVTVSS

SEQ ID NO: 32068 - protein, 96 aa, Homo sapiens
AGFGFRFGGYTMHWVRQAPGKGLEWVSLISWDSTNTYYGDSVRGRFTISRDNSRNFLYLQMNSLRTEDTAKYYCAKEGGTIFFDSWGQGTLVTVSS

SEQ ID NO: 32069 - protein, 96 aa, Homo sapiens
GGYGFRFDGYTMHWVRQAPGKGLEWVSLISWDSINTYYGDSVRGRFTISRDNSRNFLYLEMNSLTTEDTAKYYCAKEGGTIFFDSWGQGTQVTVSS

SEQ ID NO: 32070 - protein, 96 aa, Homo sapiens
ATSGFAFDAFTMHWVRQVPGQGLEWVSLISWDSTNTYYADSVKGRFTISRDNSKNSLYLRMNTLRTEDTAFYYCAKEGGTIFFDSWGQGTQVTVSS

SEQ ID NO: 32071 - protein, 97 aa, Homo sapiens
TASGFTFGGYPMSWVRQAPGKGLEWVGFIRSKAYGGTTEYAASVKGRFNISRDDSKSIAYLQMNSLKSEDTAVYYCTREVGGVSDYWGQGTLVTVSS

SEQ ID NO: 32072 - protein, 96 aa, Homo sapiens
ASGFTFGDCAMSWVRQAPGKGLEWVGFIRSKAYGGTTEYAASVKGRFTISRDDSKSVAYLQMNSLKTEDTAVYYCTREVGGVSDYWGQGTLVTVSS

SEQ ID NO: 32073 - protein, 95 aa, Homo sapiens
AASGFTFSTYAMSWVRQPPGKGLEWVSYISSSSSTIYYADSVKGRFTISRDNAKNSLYLQMNSLRAEDTAVYYCARDFGGYFQHWGQGTLVTVSS

SEQ ID NO: 32074 - protein, 95 aa, Homo sapiens
AASGFTFSSYTMNWVRQAPGKGLEWVSYISSSSSTIYYADSVRGRFTISRDNAKNSLYLQMNSLRDEDTAVYYCARDFGGYFQHWGQGTLVTVSS

SEQ ID NO: 32075 - protein, 93 aa, Homo sapiens
AASGFTFSSYWMSWVRQAPGKGLEWVANIKQDGSEKYYVDSVKGRFTISRDNTKNSLYLQMNSLRAEDTAVYYCARNWAFDYWGQGTLVTVSS

SEQ ID NO: 32076 - protein, 93 aa, Homo sapiens
AASGFTFSNYWMSWVRQAPGKGLEWVANIKKDGSEKYYVDSVKGRFTISRDNAKNSLYLQMNSLRAEDTAVYYCARNWAFDYWGQGTLVIVSS

SEQ ID NO: 32077 - protein, 97 aa, Homo sapiens
AASGFSFSYFWFHWVRQTPGKGLDWVSRIDPNGDNIVYADSVKGRFTISRDNAANTLHLQMTSLRDDDTALYFCVRGTSDWAGTDYWGQGSLVTVSS

SEQ ID NO: 32078 - protein, 97 aa, Homo sapiens
VASGFPIRNYWMHWVRQAPGKGLVWVSRLSDDRDTIEYADSVNGRFTISRDDAKNTLYLQMSSLRDEDTALYYCVRGTSDWAGTDYWGQGTLVTVSS

SEQ ID NO: 32079 - protein, 91 aa, Homo sapiens
AASGFTFSSYSMNWVRQAPGKGLEWVSYISSSSSTIYYADSVKGRFTISRDNAKNSLYLQMNSLRAEDTAVYYCAGGLGYWGQGTLVTVSS

SEQ ID NO: 32080 - protein, 90 aa, Homo sapiens
AASGFTFSSYEMNWVRQAPGKGLEWVSSISSSGSTIYYADSVKGRFTISRDNAKSSLYLQMNTLRAEDTAVYYCAGGLGYWGQGTLVTVS

SEQ ID NO: 32081 - protein, 92 aa, Homo sapiens
AASGFTFRTSWMAWVRQAPGRGLEWAANINPTGTGKAYVDSVKGRFTISKDNAKNSMDLQMNSLRGEDTAVYYCVTDGGALWGQGAPVIVSS

SEQ ID NO: 32082 - protein, 91 aa, Homo sapiens
AASGFTFSRSWMSWARQPPGKGLEWVAYIKPEGNEKSYVDSVRGRFTVSRDNVKNLVFLQMNSLRVEDTAQYYCVTDGGALWGQGTLVTVS

SEQ ID NO: 32083 - protein, 99 aa, Homo sapiens
AASGLIPSSYWMHWVRQAPGKGLVWVSRISVDGSTTAYADSVKGRFTISRDNAKNTLYLQMNSLRAEDTAVYYCARDPDSGGYSWFDPWGQGTLVTVSS

SEQ ID NO: 32084 - protein, 99 aa, Homo sapiens
AASGFTFSNYWMHWVRQAPGKGLVWVSRINSDGSSISYADSVKGRFTISRDNAKNTLYLQMNSLRAEDTAVFYCARDPDSGGYSWFDPWGQGTLVTVSS

SEQ ID NO: 32085 - protein, 103 aa, Homo sapiens
GSGFTLGDYGVSWFRQAPGKGPEWVGFIKSERYGGTTEYAPSVKGRFNLSRDDSKSIAYLQMNSLKTEDTAVYHCSRGCSGGSCYYYFGMDVWGQGTTVTVSS

SEQ ID NO: 32086 - protein, 104 aa, Homo sapiens
KVSGFTFGDYGMSWFRQAPGKGLEWVGFSRSQAYGGTTEYAASVKGRFTISRDDSKNIAYLEMNSLKTEDTAVYYCSRGCSGGSCYYYFGMDVWGQGTTVTVSS

SEQ ID NO: 32087 - protein, 99 aa, Homo sapiens
TVSGDSITSGVYYWSWIRQHPGKGLEWIGYIYYSGSTYYNPSLKSRVTISLDKSKNQFSLNLSSVTAADTAVYFCAREPYGGNSHFDFWGQGTLVTVSS

SEQ ID NO: 32088 - protein, 98 aa, Homo sapiens
TVSGASLSSDVYYWTWIRQYPGKGLEWIGYIYYSGSTYYNPSLKSRLTISMDKSKNQFSLKLNSVTAADTAVYYCAREPYGGNSHFDFWGQGTLVTVS

SEQ ID NO: 32089 - protein, 93 aa, Homo sapiens
AASGFTFSTYTMSWVRQAPGKGLEWVSTIYAGGSTTYNADSLKGRFTISRDDSKNTLYLQMNSLRAEDTARYYCVTGGWGDYWGQGTLVTVSS

SEQ ID NO: 32090 - protein, 93 aa, Homo sapiens
AASGFNFSGFVMTWVRQPSGKGLEWVSAISENDETTFYADSVKGRFTISRDNSRNTLYLQMNSLSADDTALYYCVTGGWGDYWGQGTLVTVSS

SEQ ID NO: 32091 - protein, 93 aa, Homo sapiens; identical to SEQ ID NO: 32090

SEQ ID NO: 32092 - protein, 91 aa, Homo sapiens
AVYGESFSGNHWSWIRQAPGRGLEWIGEINLRGSTIYNPSLKSRVTISVDTSKNQFSLNLTSVTAADTAVYYCAKGVGAYWGQGTLVTVSS

SEQ ID NO: 32093 - protein, 91 aa, Homo sapiens
AVYGASFSDNYWSWMRQRPGKGLEWIGEINHRGSTNYNPSLKSRVSMSVDTSKNQFSLNLRSATAADTAVYYCAKGVGAYWSPGTLVTVSS

SEQ ID NO: 32094 - protein, 101 aa, Homo sapiens
ASGFTFSSPAAVQWVRQPRGQRLEWIGWIVVASGKTDYAQKFQERVTFTRDMSTNTAYMELSSLRSEDTAVYYCAAPNCNRTSCYDGFDIWGQGTLVTVSS

SEQ ID NO: 32095 - protein, 100 aa, Homo sapiens
ASGFSFSTSAVQWVRQARGQRLEWIGWMVVGSGNTNFAQEFQERVTISRDMSTTTAYMELSSLRSEDTAVYYCAAPNCNRTSCYDGFDIWGQGTMVTVSS

SEQ ID NO: 32096 - protein, 96 aa, Homo sapiens
AASGFSFGNYEMNWVRQAPGKGLEWVSSIHASDGRTWYAESVKGRFTISRDNDKNTLYLQMNSLRAEDTALYYCAKDLPHASFDYWGQGTLVTVSS

SEQ ID NO: 32097 - protein, 96 aa, Homo sapiens
AASGFTFSNYEMSWVRQAPGKGLEWVASIFRSGGSTYYADSVKGRFTISRDNSKNTVDLQMNSLRAEDTALYYCAKDLPHASFDYWGQGTLLTVSS

SEQ ID NO: 32098 - protein, 95 aa, Homo sapiens
AASGFALSKYWIHWVRQAPGKGLVWVSRIKNDGTSTDYADAVKGRFAISRDNGKNTVNLQMNGLRVEDTAVYYCARSTLLRGVHWGQGTLVTVSS

SEQ ID NO: 32099 - protein, 93 aa, Homo sapiens
ASGMTFSKYWIHWVRQVPGKGLLWLSHINDDGGITDYADSVKGRFTISRDNAKRTAYLQMNSLRLEDTATYFCARSTLLRGVHWGQGTLVIVS

SEQ ID NO: 32100 - protein, 96 aa, Homo sapiens
AVYGGSFSGYYWSWIRQPPGKGLEWIGEINHSGSTNYNPSLKSRVTISVDTSKNQFSLKLSSVTAADTAVYYCARGYDILTGLDYWGQGTLVTVSS

SEQ ID NO: 32101 - protein, 96 aa, Homo sapiens
AVYGGSFSDYYWSWIRQPPGKGLEYIGEIDHSGSTNYNPSLKSRVTISIDTSKNQFSLKLNSVTAADTAVYYCARGYDILTGLDYWGQGTLVTGSS

SEQ ID NO: 32102 - protein, 96 aa, Homo sapiens
AVYGGSFSDYYWSWIRQPPGKGLEWIGEIDHSGSTNYNPSLKSRVTISVDTSKNQFSLKLNSVTAADTAVYYCARGYDILTGLDYWGQGTLVTVSS

SEQ ID NO: 32103 - protein, 92 aa, Homo sapiens
AASGFSISGNYMNWVRQAPGKGLEWVAGFTSTGNTHYGDSVKGRFSVSRDLSNNTLFLQMNSLRAEDSALYYCARGKAFGPWGRGTLVIVSS

SEQ ID NO: 32104 - protein, 92 aa, Homo sapiens
AASGFTLSDSYMNWVRQAPGKGLEWISVLYSDGRTFYADSVKGRFTISRDESKNTLYLQMNNLRAEDMAVYYCARGKAFGPWGQGTLVTVSS

SEQ ID NO: 32105 - protein, 96 aa, Homo sapiens
GFTFSDYSVNWVRQAPGKGLEWISYISTTGTTIQYADSVEGRFTISRNNAKNSVSLQMNSLRDEDTAVYYCARVWEQGYSRGYLYWGQGALVTVSS

SEQ ID NO: 32106 - protein, 96 aa, Homo sapiens
GFTFSDYSVNWVRQAPGKGLEWISYISTTGTTIQYADSVEGRFTISRNNAKNSVSLQMNSLRDEDTAVYYCARVWEQGYSRGYLYWGQGTLVTVSS

SEQ ID NO: 32107 - protein, 94 aa, Homo sapiens
ASGYPFSDFDINWVRQAPGQGLEWMGWVSPISGHTAYAQKFQGRITLTRDTSINTFYLELSSLTSDDTAVYYCTRGIGVAGDYWGQGTLVTVSS

SEQ ID NO: 32108 - protein, 94 aa, Homo sapiens
ASGYTFTGFDINWVRQATGQGLEWMGWVSPNSGHTAYAQKFQGRVTMTRDTSISTAYMELTSLTSDDTAVYYCTRGIGVAGDYWGQGTLVTVAS

SEQ ID NO: 32109 - protein, 94 aa, Homo sapiens
ASGYPFTGFDINWVRQAPGQGLEWMGWVSPISGHTASAQKFQGRITLTRDTSINTFYMELSSLTSDDTAVYYCTRGIGVAGDYWGQGTLVTVSS

SEQ ID NO: 32110 - protein, 94 aa, Homo sapiens
ASGYSFSNFDINWVRQAPGQGLEWMGWMNPKVGNTAYAQKFQGRVAMTRDTSISTAYLELSDLGPEDTAVYYCTRGIGVAGDYWGQGTRVTVSS

SEQ ID NO: 32111 - protein, 99 aa, Homo sapiens
AASGFTFSSYALSWVRQVPGKGLEWVSAISDSGDSTYSADSVKGRFTISRDNSKNTLYLQMNSLRPEDTAVYYCAKGSAAGRPYYFDSWGQGTLVTVSS

SEQ ID NO: 32112 - protein, 99 aa, Homo sapiens
AASGFTFNSYAMSWVRQAPGKGLECVSAISDGGGSTWFADSVKGRFTISRDNSKNMLYLQVNSLRDEDTAVYYCAKGSAAGRPYYFDSWGQGTLVTVSS

SEQ ID NO: 32113 - protein, 97 aa, Homo sapiens
AVSGFTFSNYWMHWVRRAPGKGLVWVARMDTNGRDISYADSVRGRFTISRDNAKNTLFLQMNSLRVDDTAVYYCARLYSGYDFFDHWGLGTLVSVSS

SEQ ID NO: 32114 - protein, 97 aa, Homo sapiens
VASGFTFSNYWMHWVRQVPGKGLVWVSRTDSDGSDITYADSVKGRFTISRDNAKNTLYLQMNNLRVEDTAVYYCARLYSGYDFFDHWGQGTLVTVSS

SEQ ID NO: 32115 - protein, 94 aa, Homo sapiens
ASGYTFTSHDINWLRQAPGQGLQWMGWMTPRNGQTGYAQKFQDRVTMTRDTSTNTAYMELSSLRSDDTAVYYCARGVGNVGDYWGQGTLVTVSS

SEQ ID NO: 32116 - protein, 93 aa, Homo sapiens
ASGYSFTSYDINWVRQAAGQGLEWMGWINTNNGATGYAQKFQGRVTLTMDTSINTAYMELKSLKSDDTAVYFCARGVGNVGDYWGQGALVSVS

SEQ ID NO: 32117 - protein, 94 aa, Homo sapiens
ASGYTFTSNDINWVRQAPGQGLEWLGWMKPNNGATGYAQKFQGRVTMTRDVSIDTAYMELSSLRSEDTAVYYCARGVGNVGDYWGQGTPVTVSS

SEQ ID NO: 32118 - protein, 98 aa, Homo sapiens
AVSGFTISNYWMSWVRQAPGKGLEWVANIKDDGSEKYYVDSVKGRFTISRDKAKNSLSLQMNSLRDEDTAVYYCARRYSSDWYYFDYWGQGTLVTVSS

SEQ ID NO: 32119 - protein, 98 aa, Homo sapiens
AASGFTFSNYWMSWVRQAPGKGLEWVANIKQDASEQYYVDSVKGRFTTSRDNAKNSLYLQMNSLRAEDTAVYYCARRYSSDWYYFDYWGQGTLVTVSS

SEQ ID NO: 32120 - protein, 99 aa, Homo sapiens
ASGYTFTSYDINWVRQATGQGLEWMGWMNPNSGNTGYAQKFQGRVTMTRNTSISTAYMELSSLRSEDTAVYYCARRFYDFWSGYYTDYWGQGTLVIVSS

SEQ ID NO: 32121 - protein, 99 aa, Homo sapiens
ASGYTFTSYDINWVRQATGQGPEWMGWMNPNSGNTGFAQKFQGRVTMTRNTSISTAYMELSSLRSEDTAVYYCARRFYDFWSGYYTDYWGQGTLVTVSS

SEQ ID NO: 32122 - protein, 92 aa, Homo sapiens
AASGFTFSSHWMSWVRQAPGKGLEWVANIKQDGSEKYYVDSVKGRFTISRDNAKNSLYLQLNSLRAEDTAVYYCARDEGTFWGQGTLVTVSS

SEQ ID NO: 32123 - protein, 92 aa, Homo sapiens; identical to SEQ ID NO: 32122

SEQ ID NO: 32124 - protein, 92 aa, Homo sapiens
VASGFIFSNSWMAWVRQAPGKGLEWVANIKQDGSEKHYVDSVKGRFTVSIDNAKNSVYLQMNNLRAEDSAVYYCARDEGTFWGQGTLVSVSS

SEQ ID NO: 32125 - protein, 96 aa, Homo sapiens
VASGFSFSTYGMHWVRQAPGKGLEWVAVVWYDESQKFYADSVKGRLSISRDNSKNTVYLQMNSLRADDTAVYYCARDWAGRRCDHWGQGILVSVSS

SEQ ID NO: 32126 - protein, 95 aa, Homo sapiens
ASGFSFSTYGMHWVRQAPGKGLEWVAVIWYDGSEKYYADSVKGRFTISRDNSKNTVSLQMNNLRAEDTAVYYCARDWAGRRCDHWGQGTPVTVSS

SEQ ID NO: 32127 - protein, 94 aa, Homo sapiens
AASGLTFSNAWMTWVRQAPGKGLEWVGRIKTKSEGGATDYAAPVKGRFTILRDDSKNTLYLQMNSLKTEDTAVYYCTNLYFDYWGQGTLVTVSS

SEQ ID NO: 32128 - protein, 94 aa, Homo sapiens
AVSGFSFSNAWMNWVRQAPGKGLEWVGRMKSKTDGGTTEYAAPVEGRFTISRDDSKNTLYLQMSSLKTEDTAVYYCTNLYFDYWGQGTLVTVSS

SEQ ID NO: 32129 - protein, 99 aa, Homo sapiens
AASGFTFSDYYMSWIRQAPGKGLEWVSFISSSSSYTNYADSVKGRFTISRDNGKNSLYLQMNSLRAEDTAVYYCARDGGRDGYNYLDYWGQGTLVTVSS

SEQ ID NO: 32130 - protein, 99 aa, Homo sapiens
AASGFTFSDYYMTWIRQAPGKGLEWVSYISGSGSSTNYAESLRGRFTISRDNAKNSLYLQMDSLRAEDTAVYYCARDGGRDGYNYLDYWGQGTLVTVSS

SEQ ID NO: 32131 - protein, 94 aa, Homo sapiens
AASGFTFSDYYMTWMRQAPGKGPEWISYISSSSHDTNYADSVKGRFTISRDNARNSLYLQMSSLRADDTAVYYCARTARLVDYWGPGTLVSVSS

SEQ ID NO: 32132 - protein, 94 aa, Homo sapiens
AASGFTFSDHYMSWIRQAPGKGLEYISYISNSGSTTSYTDSLKGRFTISRDNAKNSLYLQVNSLRAEDTAVYYCARTARLVDYWGQGTLVTVSS

SEQ ID NO: 32133 - protein, 97 aa, Homo sapiens
AASGFSFSSNVMYWVRQAPGRGLEWVSRISHDASNEQYADSVRGRFTISRDNSRNTLYLQMNSLRVEDTALYYCVKDRTNTWSFDYWGQGTLVTVSS

SEQ ID NO: 32134 - protein, 97 aa, Homo sapiens
GASGFTFSNTVMHWVRQAPGKGLEWVALILHDGSKKFYGDSVKGRFTISRDNSKNTLFLQMDSLRAEDTAVYHCVKDRTNTWSFDYWGQGTLVTVSS

SEQ ID NO: 32135 - protein, 97 aa, Homo sapiens; identical to SEQ ID NO: 32134

SEQ ID NO: 32136 - protein, 96 aa, Homo sapiens
AASGFPFSGYAMTWVRQAPGKGLEWVSYISEYYSPTFYADSVKGRFTISRDNAKNSLYLQMDNLRHEDTAVYYCARGYGTSWFYQWGQGTLVTVTS

SEQ ID NO: 32137 - protein, 96 aa, Homo sapiens
AASGFTFSNYAMTWVRQAPGKGLEWLSYISENYTPTFYADSVKGRFTISRDNAKNSLYLQMDDLRHEDTAVYWCARGYGTSWFYQWGQGTLVTVTS

SEQ ID NO: 32138 - protein, 96 aa, Homo sapiens
AASGFTFSSYAMTWVRQAPGKGLEWLSYISEYYNPTFYADSVKGRFTISRDNAKNSLYLQMDNLRHEDTAVYYCARGYGTSWFYQWGQGTLVTVTS

SEQ ID NO: 32139 - protein, 96 aa, Homo sapiens
AASGFMFSNYAMTWVRQAPGKGLEWVSYISENYNPTFYADSVKGRFTISRDNAKNSLFLQMDNLRHEDTALYYCARGYGTSWFYQWGQGTLVTVAS

SEQ ID NO: 32140 - protein, 96 aa, Homo sapiens; identical to SEQ ID NO: 32136

SEQ ID NO: 32141 - protein, 96 aa, Homo sapiens
AASGFTFSNYGMTWVRQAPGKGLEWLSYISERYAPTFYADSVKGRFTVSRDNAKNSLYLQMDDLRHEDTAVYWCARGYGTSWFYQWSQGTLVTVTS

SEQ ID NO: 32142 - protein, 96 aa, Homo sapiens
AASGFIFSSQNMNWVRQAPGKGLEWVSFISGSGSPLYYADSVKGRFTISRDNAKNSLYLQMNSLRDEDTAVYYCARGYGTSWFYQWGQGTLVTVSS

SEQ ID NO: 32143 - protein, 91 aa, Homo sapiens
SGFNFSAYDMHWVRQSPGSGLEWVSGIGVAADSYYPVSVKGRFTISRENARDSLYLEMNNLRAGDTAIYYCTRDAHGMDVWGQGTTVTVSS

SEQ ID NO: 32144 - protein, 93 aa, Homo sapiens
AASGFSFITYDMHWVRQTPERRLEWVAAFDTSGDTYYSDSLKGRFTISKDSAKNFLYLQMNSLRAGDTAVYYCTRDAHGMDVWGQGTTVIVSS

SEQ ID NO: 32145 - protein, 96 aa, Homo sapiens
AASGFTFSSHGIHWVRQAPGKGLEWVAVISHDGSNQFSVESVKGRFTISRDNSKNTAQLQMNSLRVEDTAVYYCARGDVGSYFPYWGQGSLVTVSS

SEQ ID NO: 32146 - protein, 96 aa, Homo sapiens
VASGFTFSSYAIHWVRQAPGKGLEWVAVISYDGGNKYYVDSVKGRFTMSRDNSKNTLYLQMDSLRPEDTAVYYCARGDVGSYFPYWGQGTLVTVSS

SEQ ID NO: 32147 - protein, 97 aa, Homo sapiens
ASGYTFTTYYIHWVRQAPGQGLEWMGIIKPSDGSTTYAQKFQGRVTMTRDTSTSTVYMELSSLRSEDTALYYCARDHGNGWSYFDYWGQGTLVTVSS

SEQ ID NO: 32148 - protein, 97 aa, Homo sapiens
ASAYTLTSHYMHWVRQAPGQGLEWMGIIKPSDGTTSYSEGFQGRVTMTRDTSTGTVYMELNSLRSEDTAVYYCARDHGNGWSYFDYWGQGTLVTVSS

SEQ ID NO: 32149 - protein, 100 aa, Homo sapiens
AASGFTFSDYCMSWIRQAPGKGLEWVSYISTSSSTIHYADSVKGRFTISRDNAKNSLYLQMNSLAAEDTALYYCVRDITAPGSTEYFHYWGQGTLVTVSS

SEQ ID NO: 32150 - protein, 100 aa, Homo sapiens
AASGFTFSDYQMTWIRQAPGKGLEWVSYISRSGDTIYYRDSVEGRFTISRDNAKNYLYLQMNSLRVEDTAVYYCVRDITAPGSTEYFHYWGQGTLVTVSS

SEQ ID NO: 32151 - protein, 93 aa, Homo sapiens
AASGFTFSDYYMSWIRQAPGKGLEWVSYIRGSGSTMYYADSVKGRFTISRDNAKNSLYLQMNSLRAEDTAIYYCARDSHFDYWGQGTLVTVSS

SEQ ID NO: 32152 - protein, 93 aa, Homo sapiens
AASGFTFGDYYMSWVRQAPGKGLEWVSYIRSTGNPFYYANSVKGRFTISRDNTKNFLYLQMNNLRAEDTAVYYCARDSHFDYWGQGTPVTVSS

SEQ ID NO: 32153 - protein, 95 aa, Homo sapiens
AVSGGSITSSKWWSWVRQSPGKGLEWIGQIYLSGSPDYNPSLKSRATISVDKSKNQIFLNLKSVSAADTAVYYCTRNGYYSLDYWGQGTLVTVSS

SEQ ID NO: 32154 - protein, 94 aa, Homo sapiens
AVSGDSISRTSWWSWARQPPGMGLEWIGEISHSGSTNYNPSLKSRVTISVDKSKNQFSLHLSSVTAADTAVYYCTRNGYYSLDYWGQGTLVTVS

SEQ ID NO: 32155 - protein, 95 aa, Homo sapiens
AVSGDSISRTSWWSWARQPPGMGLEWIGEISHSGSTNYNPSLKSRVTISVDKSKNQFSLHLSSVTAADTAVYYCTRNGYYSLDYWGQGTLVTVSP

SEQ ID NO: 32156 - protein, 94 aa, Homo sapiens
AVSGDSISRTSWWSWARQPPGMGLEWIGEISHSGSTNYNPSLKSQVTISVDKSKNQFSLHLSSVTAADTAVYYCTRNGYYSLDYWGQGTLVTVS

SEQ ID NO: 32157 - protein, 94 aa, Homo sapiens
AVSGDSISRTSWWSWARQPPGMGLEWIGEISHSGSTNYNPSLKSRVTISVDKSKNQFSLHLSSVTAADTAVYYCTRNGYYSLDYWGRGTLVTVS

SEQ ID NO: 32158 - protein, 94 aa, Homo sapiens; identical to SEQ ID NO: 32154

SEQ ID NO: 32159 - protein, 94 aa, Homo sapiens
AVSGDSISRTSWWSWARQPPGMGLEWIGEISHSGSTNYNPSPKSRVTISVDKSKNQFSLHLSSVTAADTAVYYCTRNGYYSLDYWGQGTLVTVS

SEQ ID NO: 32160 - protein, 94 aa, Homo sapiens
AVSGDSISRTSWWSWARQPPGMGLEWIGEISHSGSTNYNPSLKSRVTISVDKSKNQFSLPLSSVTAADTAVYYCTRNGYYSLDYWGQGTLVTVS

SEQ ID NO: 32161 - protein, 95 aa, Homo sapiens; identical to SEQ ID NO: 32155

SEQ ID NO: 32162 - protein, 94 aa, Homo sapiens
AVSGDSISRTSWWSWARQPPGMGLEWIGEISHSGSTNYNPSLKSRVTISVDKSKNHFSLHLSSVTAADTAVYYCTRNGYYSLDYWGQGTLVTVS

SEQ ID NO: 32163 - protein, 94 aa, Homo sapiens; identical to SEQ ID NO: 32154

SEQ ID NO: 32164 - protein, 95 aa, Homo sapiens
AASGLTLSKYIMVWVRQAPEKGLEWVSTMSGDSTYYSDSVKGRFTISRDNSKNTLDLQMNSLRAEDTAVYYCAKASSGTRGWFDPWGQGTLVIVS

SEQ ID NO: 32165 - protein, 97 aa, Homo sapiens
EASGGFTFSRYIMTWVRQSPGKGLEWVSTISGDSTFYAGSVEGRFAISRDNSKNTLHLQVNDLRAEDTAIYYCAKASSGTRGWFDPWGQGVVVIVSS

SEQ ID NO: 32166 - protein, 90 aa, Homo sapiens
VASDSTFNIYWMSWVRQAPGKGLEWVANIKEDGSEKYFADSVKGRFTISRDNAKNSLYLQMNSLRVEDAGIYYCTSGSVWGQGTTVTVSS

SEQ ID NO: 32167 - protein, 88 aa, Homo sapiens
ASDSTFNIYWMSWVRQAPGKGLEWVANIKEDGSARYYVDSVKGRFTISRDNTKNSVYLQMSSLRVEDTAVYYCTSGSVWGQGTTVTVS

SEQ ID NO: 32168 - protein, 89 aa, Homo sapiens
ASDSTFNIYWMSWVRQAPGKGLEWVANIKEDGSERYYVASVKGRFTISRDNTKNSVYLQMDSLRVEDTAVYYCTSGSVWGQGATVTVSS

SEQ ID NO: 32169 - protein, 89 aa, Homo sapiens
ASDSTFNIYWMSWVRQAPGKGLEWVANIKEDGTERYYVDSVKGRFTISRDNTKNSVYLQMDSLRVEDTAVYYCTSGSVWGQGATVTVSS

SEQ ID NO: 32170 - protein, 89 aa, Homo sapiens
ASESTFNIYWMSWVRQAPGKGLEWVANIKEDGRERYYVDSVKGRFTISRDNTKNSVYLQMDSLRVEDTAVYYCTSGSVWGQGATVTVSS

SEQ ID NO: 32171 - protein, 89 aa, Homo sapiens; identical to SEQ ID NO: 32170

SEQ ID NO: 32172 - protein, 89 aa, Homo sapiens
ASDSSFNIYWMSWVRLAPGKGLEWVANVKEDGSERYYVDSVKGRFTISRDNTKNSVYLQMNSLRAEDTAVYYCTSGSVWGQGTTVTVSS

SEQ ID NO: 32173 - protein, 89 aa, Homo sapiens; identical to SEQ ID NO: 32170

SEQ ID NO: 32174 - protein, 88 aa, Homo sapiens
ASDSSFNIYWMSWVRQAPGKGLEWVANIKADGSERYYVDSVKGRFTISRDNTKNSIYLQMNSLRAEDTAVYYCTSGSVWGQGTTVTVS

SEQ ID NO: 32175 - protein, 89 aa, Homo sapiens
ASDSTFNIYWMSWVRQAPGKGLEWVANIKEDGTERYYVDSVKGRFTISRDNTKNSVYLQMDSLRAEDAAVYYCTSGSVWGQGATVTVSS

SEQ ID NO: 32176 - protein, 89 aa, Homo sapiens
ASDSTFNIYWMSWVRQAPGKGLEWVANIKEDGSERYHVASVKGRFTISRDNTKNSVYLQMDSLRVEDTAVYYCTSGSVWGQGATVTVSS

SEQ ID NO: 32177 - protein, 89 aa, Homo sapiens
ASDSTFNMYWMSWVRQAPGKGLEWVANIKEDGTERYYVDSVKGRFTISRDNTKNSVYLQMDSLRAEDTAVYYCTSGSVWGQGATVTVSS

SEQ ID NO: 32178 - protein, 89 aa, Homo sapiens
ASDSTFNIYWMSWVRQAPGKGLEWVANIKEDGSERYYVASVKGRFTISRDNTKNSVYLQMDNLRVEDTAVYYCTSGSVWGQGATVTVSS

SEQ ID NO: 32179 - protein, 99 aa, Homo sapiens
AASGFTFSNYAMTWVRQVPGKGLEWISAITHNGGDTYDADSVKGRFTISRDNSKNTLFLQMNSLTAEDTAIYYCTKGSSSSRPYYFDFWGRGTLVTVSS

SEQ ID NO: 32180 - protein, 99 aa, Homo sapiens
AASGFTFSSYAMSWVRQAPGEGLEWFSAITDSGGDTYHADSVKGRFTISRDNSKNTLYLQMNSLRAEDTAIYYCTKGSSSSRPYYFDFWGQGTLVTVSS

SEQ ID NO: 32181 - protein, 96 aa, Homo sapiens
VSGGSISNYYWSWIRQPPGKGLEWIGYIYYSGSTNYNPSLKSRVTISVDTSKNQFSLKLNSVTAADTAVYYCARVYSSSWYYLDYWGQGTLVTVSS

SEQ ID NO: 32182 - protein, 97 aa, Homo sapiens
TVSGGPMNAYYWTWIRQPPGKGLEWIGYIYYSGSTNYNPSLKSRVTISIDTSKNQFSLKLSSLTAADTAVYYCARVYSSSWYYLDYWGQGTLVTVSS

SEQ ID NO: 32183 - protein, 98 aa, Homo sapiens
AASGFTFSNFAMHWVRQAPGKGLEWVSGISGSGDGTYYVDSVKGRFSISRDTSKNTVYLQMNSLRVEDTAVYYCAKASGSPKGWFDPWGQGTLVTVSS

SEQ ID NO: 32184 - protein, 98 aa, Homo sapiens
AASGFTFTTYGMHWVRQAPGKGLEWVSGISGSGDDTYYLDSVKGRFTISRDTSKNILYLQMNSLRVEDTAVYYCAKASGSPKGWFDPWGQGTLVTVSS

SEQ ID NO: 32185 - protein, 98 aa, Homo sapiens
AASRFTFSNYAMNWVRQAPGKGLEWVSLISGSGDTTYYADSVKGRFTISRDTSKNTLYLQMNSLRAEDTAVYYCAKASGSPKGWFDPWGQGTLVTVSS

SEQ ID NO: 32186 - protein, 97 aa, Homo sapiens
AASGFTVSTYGMNWVRQAPGKGLEWVSVISGAGGDTYYADSVKGRFTISRDNSKNMLYLQMNSLRAEDTAVYYCAKASGSPKGWFDPWGQGTLVTVS

SEQ ID NO: 32187 - protein, 100 aa, Homo sapiens
AASGFTFDDYAMHWVRQTPGKGLEWVSGIGWNNDKTDYADSVKGRFTISRDNAKNSLFLEMNSLRSEDTALYYCAKDMWLQQWANAFDIWGQGTMVTVSS

SEQ ID NO: 32188 - protein, 100 aa, Homo sapiens
AASGFTFDDYAMHWVRQTPGKGLEWVSGIGWNNDKIDYADSVKGRFTISRDNAKNSLFLEMNSLRSEDTALYYCAKDMWLQQWANAFDIWGQGTMVTVSS

SEQ ID NO: 32189 - protein, 100 aa, Homo sapiens
AASGFTFDDYAMHWVRQTPGRGLEWVSGISWNSGKIDYADFVKGRFTISRDNAKNSLYLQMDSLRAEDTALYYCAKDMWLQQWANAFDIWGQGAMVTVSS

SEQ ID NO: 32190 - protein, 100 aa, Homo sapiens
AASGFTFDDYAMHWVRQTPGKGLEWISGISWNSGNVDYADSVKGRFTISRDNAKNSLYLQMNSLRPEDTALYYCAKDMWLQQWANAFDIWGQGTMVTVSS

SEQ ID NO: 32191 - protein, 97 aa, Homo sapiens
SGYSFTSFGISWVRQVPGQGPEWMGWINADNGHTNYAQNLQGRVTLTTDTSTSTAYMELRSLISDDTAVYYCARDHYTSGSFYFDYWGQGTLVTVSS

SEQ ID NO: 32192 - protein, 97 aa, Homo sapiens
SGFTFTTYGLSWVRQAPGQGLEWMGWISTYNGNTDYAQNLQDRVTMTTDTSTSTAYMELRSLRSDDTAVYYCARDHYTSGSFYFDYWGQGTLVTVSS

SEQ ID NO: 32193 - protein, 91 aa, Homo sapiens
AASGFTFSSSAMTWVRQAPGKGLEWVSVISTNGDTTYYADSVKGRFTISRDNSKNTLYLQMNSLRAEDTAVYYCAKMGDYWGQGTLVTVSS

SEQ ID NO: 32194 - protein, 91 aa, Homo sapiens
AASGFTFSSYAMSWVRQAPGKGLEWVSTFSGSAAGTYYADSVKGRFTISRDNSKSTLYLQMNSLRAEDTAVYYCAKMGDYWGQGTLVTVSS

SEQ ID NO: 32195 - protein, 90 aa, Homo sapiens
AASGFTFSSSWMSWVRQAPGKGLEWVANINQDGSEKYYVDSVKGRFTISRDNAKNSLYLQMNSLRAEDTAVYYCARAEMWGKGTLVTVSS

SEQ ID NO: 32196 - protein, 90 aa, Homo sapiens
ATSGFTFSSEWMSWVRQAPGKGLEWVANINPDGSENSYVDSVKGRFTISRDNAKNSLYLQMNSLTADDTAVYYCARAEMWGQGALVTVSS

SEQ ID NO: 32197 - protein, 98 aa, Homo sapiens
AASGFTSKKYKNAMHWVRQAPGKGLEWVSGFNLDSGRVDYAESVKGRFTISRDNAKDSLYLQMDSLRPEDTALYYCVKDVSAGGADVWGQGTTVTVSS

SEQ ID NO: 32198 - protein, 95 aa, Homo sapiens
AASGFTFNDYAMHWVRQVPGKGLEWVSGIYWNSNRIDYADSVKGRFTISRDNAKNSLYLQMNSLRVEDTALYYCVKDVSAGGADVWGQGTTVTVS

SEQ ID NO: 32199 - protein, 107 aa, Homo sapiens
ISGDGVSSVSAAWTWIRQSPSRGLEWLGRTYYRSKWYYDYAVSVKSRIAINPDTSKNQFSLQLNSVTPEDTAVYYCARERVTMVREIVITAYGLDVWGQGTTVTVSS

SEQ ID NO: 32200 - protein, 107 aa, Homo sapiens
ISGDGVSSSSAAWNWIRQSPSRGLEWLGRTYYRAKWYNDYAISVQRRITINPDTSKNQFSLQLNSVTPEDTAIYYCARERVTMVREIVITAYGLDVWGQGTTVTVSS

SEQ ID NO: 32201 - protein, 100 aa, Homo sapiens
TVAGDSVSRSIYYWGWIRQPPGKGLEWIGSVDFSGSSYYNPSLKSRVTISVDTSMNHFSLRLDSVTAADTAVYYCARPNSSGWSGAFDIWGQGTRVTVSS

SEQ ID NO: 32202 - protein, 100 aa, Homo sapiens
TVAGDSVSRSIYYWGWIRQPPGKGLEWIGSVDFSGSSYNNPSLKSRVTISVDTSMNHFSLRLDSVTAADTAVYYCARPNSSGWSGAFDIWGQGTRVTVSS

SEQ ID NO: 32203 - protein, 96 aa, Homo sapiens
GSGITFEDHGMSWVRQVPGKGLEWVSGINWDGGSTGYGDSVKGRFTISRDNAKNSLYLQMNSLRVEDTAIYYCAGGDRNGWYFDRWGQGTLVTVSS

SEQ ID NO: 32204 - protein, 97 aa, Homo sapiens
AASGFIFNDHGMSWVRQVPGKGLVWVAGISWNSAGTGYADSVRGRFTISRDNAKNFLYLQMNNLRVEDTGLYYCAGGDRNGWYFDRWGQGTLVTVSS

SEQ ID NO: 32205 - protein, 97 aa, Homo sapiens
AASGFIFYDYGMSWVRQVPGKGLVWVAGINWNSVNTGYGDSVRGRFTISRDNAKNFLYLQMNDLRVEDTGLYYCAGGDRNGWYFDRWGQGTLVTVSS

SEQ ID NO: 32206 - protein, 95 aa, Homo sapiens
ASGYTFTNYAIHWVRQAPGQGLQCMGWINGGDGYTKYSQRFQGRVSITKDTSANTVYMELNSLTSEDSAVYYCARDWVTSGFDYWGQGTLVTVSS

SEQ ID NO: 32207 - protein, 95 aa, Homo sapiens
ASGYTFTNYAIHWVRQAPGQGLECMGWINCGNGNTRYSQKFQGKVTITRDTSANTAYMELSSLTSEDSAVYYCARDWVTSGFDYWGQGTLITVSS

SEQ ID NO: 32208 - protein, 96 aa, Homo sapiens
AASGFTFSSYWMTWVRQPPGKGLEWVAITNQDGTKKYYIDSVKGRFTISRDNAKNTLYLQLSSLRVEDTAVYYCARDVSFGRFDYWGQGTLVTGSS

SEQ ID NO: 32209 - protein, 96 aa, Homo sapiens
AASGFTFSNYWMNWVRQAPGKGLEWVASINQDGTEKYYVDSLKGRFTISRDNAKNSLYLQVNSLRGEDTAIYYCARDVSFGRFDYWGQGTLVTVSS

SEQ ID NO: 32210 - protein, 95 aa, Homo sapiens
ASGYTFTLYYIHWVRQTPGHGLEWMGIINPNAETTRYAQKFQGRVTMTSDTSTSTVYMELNNVISEDTAVYYCARGGDSGAFDIWGHGTMVVVSS

SEQ ID NO: 32211 - protein, 95 aa, Homo sapiens
ASGYTFTLYYIHWVRQTPRHGLEWMGIINPNAETTRYAQKFQGRVTMTSDTSTSTVYMELNNVISEDTAVYYCARGGDSGAFDIWGHGTMVVVSS

SEQ ID NO: 32212 - protein, 95 aa, Homo sapiens
ASGYTFTLYYIHWVRQTPGHGLEWMGIINPNAETTRYAQKFQGRVTMTSDTSTSTVYMELNNLISEDTAVYYCARGGDSGAFDIWGHGTMVVVSS

SEQ ID NO: 32213 - protein, 95 aa, Homo sapiens
ASGYVFTNYYIHWVRQAPGQGLEWMGIINPRGGSVRYAENFQGRVTMTEDTSTSTVYMELSSLGSDDTAVFYCARGGDSGAFDIWGQGTMVTVSS

SEQ ID NO: 32214 - protein, 95 aa, Homo sapiens
AVYGGSFSGYYWSWIRQSPGKGLEWIGEIKHSGSTNYNPSLKSRVTISVDTSKNQFSLKLISVTAADTAVYYCARGRWSPALDYWGQGTLVTVSS

SEQ ID NO: 32215 - protein, 95 aa, Homo sapiens
AVYGGSFSGYYWTWIRQPPGKGLEWIGEINHSGSPNYSPSLRSRVTILVDTSKNQFSLKLNSMTAADTAVYYCARGRWSPALDYWGQGTLVTVSS

SEQ ID NO: 32216 - protein, 94 aa, Homo sapiens
ATSGFTFSNFDMNWVRQAPGKGLEWVAFISNGGNTRYADPVMGRFTISRDNAKNSLYLQMDSLRAEDAAVYYCARDPPRRSDYWGLGTLVTVSS

SEQ ID NO: 32217 - protein, 95 aa, Homo sapiens
AASDFSFSSYTMSWLRQAPGKGLEWVSAISPTSDEIQYSGSVKGRFTVSRDNAHNSLYLQMNSLRAEDTAVYYCARDPPRRSDYWGQGTVVTVSS

SEQ ID NO: 32218 - protein, 95 aa, Homo sapiens
AASGFSFSSYAMGWVRQARGKGLEWVSAISPRSDDRHYADSVKGRFTISRDNAHNSLFLQLNSLRVEDTAVYYCARDPPRRSDYWGQGTVVTVSS

SEQ ID NO: 32219 - protein, 99 aa, Homo sapiens
VASGFTFSTSAMSWVRQSLGRGLEWVAAISGSGDNTYYSDSVKGRFTISRDNSRNTLYLQMNSLRAEDSATYYCAKDLPGIAAAYFDYWGQGTLVTVSS

SEQ ID NO: 32220 - protein, 99 aa, Homo sapiens
AASGFTFSSYAMSWVRQAPGKGLEWVSGISGSGHDTYYTDSVRGRFTISRDNSKNTLYLQMYSLRAEDTAVYYCAKDLPGIAAAYFDYWGRGTLVTVSS

SEQ ID NO: 32221 - protein, 93 aa, Homo sapiens
AASGFTFTNNYMTWVRQAPGKGLEWVANIKQDGSETCYVDSVKGRFTISRDNSKTSLYLQMNSLRVEDTAVYYCARGAGSSDWGRGTLVTVSS

SEQ ID NO: 32222 - protein, 93 aa, Homo sapiens
AASGFTFSSYWMTWVRQAPGKGLDWVANIKQDGSEKHYVDSVKGRFTISRDNAKNSLHLQMDSLRAEDTAVYYCARGAGSSDWGPGTLVTVSS

SEQ ID NO: 32223 - protein, 99 aa, Homo sapiens
TVSGDSISSGAYYWSWIRQLPGKGLEWIGYMYYSGSTYYNPSLKSRVTMSVDTSKNQFSLKLSSVTAADTALYYCARAYCGGDCYPDYWGPGTLVTVSS

SEQ ID NO: 32224 - protein, 99 aa, Homo sapiens
TVSGGSISSGAYYWSWIRQLPGKGLEWIGYMYYSGSTYYNPSLKSRVTMSVDTSKNQFSLKLSSVTAADTALYYCARAYCGGDCYPDYWGPGTLVTVSS

SEQ ID NO: 32225 - protein, 99 aa, Homo sapiens
SVSGDSMNSDGYYWGWIRQLPGKGLESIGYIYYSGNTFYSPSLKSRVTISLDTSRSQFSLKLTSVTAADTAMYFCARAYCGGDCYPDYWGQGTLVSVSS

SEQ ID NO: 32226 - protein, 98 aa, Homo sapiens
TVSGGSISSSTYYWGWIRQPPGKWLEFIGSIFYSGNTYYNPSLKSRVTISIDTSKNQLSLRLSSVTAADTAVYFCARLWGGLRPPDYWGQGILVTVSS

SEQ ID NO: 32227 - protein, 98 aa, Homo sapiens
TVFGGSIISSDYYWGWIRQPPGKGLESIGSMSYTGTTYYNPSLKSRVAMSVDTSKNQLSLKLSSVTAADTALYYCARLWGGLRPPDYWGLGVLVFVSS

SEQ ID NO: 32228 - protein, 96 aa, Homo sapiens
AASGFTFSDYYMSWIRQAPGKGLEWVSYISTSGSTKYYADSVKGRFTISRDNAKNSLYLQMNSLRAEDTAVYYCARVRSGNYFDYWGQGTLVTVSS

SEQ ID NO: 32229 - protein, 96 aa, Homo sapiens
AASGFTFSNFYMSWIRQAPGKGLEWISYISSSGSTINYADSVKGRFTISRDNAKNSLYLQMNSLRAEDTAVYYCARVRSGNYFDYWGQGTLVTVSS

SEQ ID NO: 32230 - protein, 96 aa, Homo sapiens
AASGFTFSDHYMDWVRQAPGKGPEWVGRIRKKVNSYTTEYAASVKGRFTVSRDDSQNSLYLELRNLKTEDTAVYYCARVDSGLDYWGQGTLVTVSS

SEQ ID NO: 32231 - protein, 96 aa, Homo sapiens
AASGFTFSDHYMDWVRQAPGKGLEWVGRSGIKANSYTTEYAESVKGRFTISRDDSENSLYLQMNSLKIEDTAVYYCARVDSGLDYWGQGTLVTVSS

SEQ ID NO: 32232 - protein, 97 aa, Homo sapiens
AASGFTFSNSGMHWVRQAPGKGLEWMAVIWYDGSNIYYADSVKGRFTISRDNSKNMLYLQMNSLRAEDTAIYYCVKYSSAWYALDYWGQGTPVTVSS

SEQ ID NO: 32233 - protein, 97 aa, Homo sapiens
AASGFTFSASGMHWVRQAPGKGLEWVAVIWSDGTNIYYAESVKGRFTISRDNSKNTLNLQMNSLRVEDSGVYYCVKYSSAWYALDYWGQGTVVTVSS

SEQ ID NO: 32234 - protein, 90 aa, Homo sapiens
AASGVTFDIYDMHWVRQLPGKGLEWVSSIFGGDGRTFYADSVKGRFTVFRDTSKDMVYLQMSSLRAEDTAVYFCTGLWKWGQGTLVTVSS

SEQ ID NO: 32235 - protein, 88 aa, Homo sapiens
AASGFTFTRTDMNWVRQAPGKGPEWVADIISDYTTYYADSVKGRFTISRDNAKNTVSLQMDNLRADDTAVYFCTGLWKWGQGTLVTVS

SEQ ID NO: 32236 - protein, 96 aa, Homo sapiens
VASGFTFSSSAMTWVRQAPGKGLDWVSIIYSGGSTTYYADSVKGRFTISRDNSKNTLHLQMNSLRAEDTAVYYCAKGGTVTPLDYWGQGILVTVSS

SEQ ID NO: 32237 - protein, 96 aa, Homo sapiens
AASGFIFSSSAMTWVRQAPGKGLEWVSVIYSGGSTAYYADSVQGRLTISRDNSKNMVYLQMNSLRAEDTAVYYCAKGGTVTPLDYWGQGTLVTVSS

SEQ ID NO: 32238 - protein, 94 aa, Homo sapiens
VGSGFAFSTYAMSWVRQAPGKGLEWVSSISDSGVTTHYADSVKGRFTISRDNSKSTLYLQLNSLRAEDTAVYYCAKPNSLFDYWGQGTLVTVSS

SEQ ID NO: 32239 - protein, 94 aa, Homo sapiens
AGSGFAFSTYAMSWVRQAPGKGLEWVSSISDSGDKIYYADSVKGRFTISRDNSKNILHLQMNSLRAEDTAVYYCAKPNSLFDYWGQGTLVTVSS

SEQ ID NO: 32240 - protein, 92 aa, Homo sapiens
SGFMFDTYAMAWVRQAPGKGLEWVSSVSESGDRTYYSDSVRGRFTISRDNSKNTVYLQMNSLRADDTAVYYCAKPNSLFDYWGQGTLVTVSS

SEQ ID NO: 32241 - protein, 95 aa, Homo sapiens
ASGYTFTSYFIHWLRQAPGQGLEWMGIINPSGGSTTYSQNLQGRVTVTRDTSTSTVYMELSSLRSEDTAVYYCARGYNHGRLDYWGQGTLVTVSS

SEQ ID NO: 32242 - protein, 95 aa, Homo sapiens
ASGYTFTSYYMHWVRQAPGQGLDWMGIINPSGGSTTYAQKFRGRITMTRDTSTSTVYMELSSLRSEDTAVYYCARGYNHGRLDYWGQGILVTVSS

SEQ ID NO: 32243 - protein, 91 aa, Homo sapiens
TVSGGSISSGDYYWSWIRQPAGKGLEWIGRIYTSGTTNYNPSLKSRVTISVDTSKNQFSLKVNSVTAADTAVYYCVRQFDYWGQGTLVTVS

SEQ ID NO: 32244 - protein, 92 aa, Homo sapiens
TVSGGSISSGSYYWSWIRQPAGKGLEWIGRIYTSGSTNYNPSLKSRVTISVDTSKNEFSLKLSSVTAADTAVYYCVRQFDYWGQGTLVTVSS

SEQ ID NO: 32245 - protein, 99 aa, Homo sapiens
SVSGASVNSSHHYWGWIRQPPGKGLEWIGSIYYSGSTYYNSSLRSRVTISMDSSKNHFSLKLTSVSAADTAVYYCARHPAAGGDWFDPWGQGTLVFVSS

SEQ ID NO: 32246 - protein, 99 aa, Homo sapiens
SVSGDSVSSTSDYWGWIRQSPGKGLEWIGSIYSTGTSYQNPSLKSRVSISVDTSKNQFSLKLTSVTATDSGLYYCARHPAAGGDWFDPWGPGILVSVSS

SEQ ID NO: 32247 - protein, 98 aa, Homo sapiens
AASGFTFAHYNINWVRQGPGKGLEWIAFTDWNGGTSGFADSVKGRFSISRDNAKNSVFLQMNTLKPEDTALYYCARDGPYYYYGLDVWGPGTMVTVSS

SEQ ID NO: 32248 - protein, 98 aa, Homo sapiens
AASGFTFAHYNINWVRQGPGKGLEWIAFTNWNGGTSGFADSVKGRFSISRDNAKNSVFLQMNTLRPEDTTLYYCARDGPYYYYGLDVWGPGTMVTVSS

SEQ ID NO: 32249 - protein, 96 aa, Homo sapiens
SGFTFDNYNIKWVRQVPGKGLEWVAGVNWNGDSSDYADAVKGRFSIFRDNVKNSVYLQMNSLRGDDTAVYYCARDGPYYYYGLDVWGQGTSVTVSS

SEQ ID NO: 32250 - protein, 95 aa, Homo sapiens
ASGFTFRTYWLSWVRQSPGKGLEWVANIKEDGSEEYYVDSLKGRFTISRDNAKNSLYLQMNSLGAEDTAVYYCARDLPRGLFDYWGRGTLVTVSS

SEQ ID NO: 32251 - protein, 96 aa, Homo sapiens
AASGFTLGHYWMSWARQTQGKGLEWVANINTDGSEEYYMDSLKGRFTISRDNAKNSLYLQINSLRAEDTAIYYCARDLPRGLFDYWGQGTPVTVSS

SEQ ID NO: 32252 - protein, 96 aa, Homo sapiens; identical to SEQ ID NO: 32251

SEQ ID NO: 32253 - protein, 101 aa, Homo sapiens
AASGFTFSSYWMSWVRQAPGKGLEWVANVKQDGNEKYYVDSVKGRFTISRDNAKNSLYLQMNSLRAEDTAVYYCARDGSRGSSQYNWFDPWGQGTLVTVSS

SEQ ID NO: 32254 - protein, 101 aa, Homo sapiens
AASGFAFSTYWFNWVRQAPGKGLEWVANIKQDGSEKYYVDSVKGRFTISRDNARNSVYLQMNSLRADDTGVYYCARDGSRGSSQYNWFDPWGQGTLVTVSS

SEQ ID NO: 32255 - protein, 102 aa, Homo sapiens
TVSGGSISSNGHYWGWIRQPPGKGLEWIGSIYFSGSTYSNPSLKSRVTISSDTSKNQFSLRLSSVTAADTAVYYCARHRGYSGYDLNWFDPWGQGTLVTVSS

SEQ ID NO: 32256 - protein, 102 aa, Homo sapiens
SVSGGSISSSGYYWGWIRQPPGKGLEWIASIIYSGSTYYNPSLKSRVTIFADRSKNQFSLKLSSVTAADTAVYYCARHRGYSGYDLNWFDPWGQGTLATVSS

SEQ ID NO: 32257 - protein, 98 aa, Homo sapiens
VSGGSISPYYWSWVRQPPGKGLECIGYIHYSGSTNYNPSLKSRVSISVDTSKKQLSLKLSSVTAADTAVYYCARLSGSSYYYYGMDVWGQGTTVIVSS

SEQ ID NO: 32258 - protein, 99 aa, Homo sapiens
TVSGASLSPYYWSWIRQSPGKGLEWIGYVHYSGSTNYSPSLKSRVTISLDKSENQFSLRLRSVTAADTASYYCARLSGSSYYYYGMDVWGQGTTVSVSS

SEQ ID NO: 32259 - protein, 94 aa, Homo sapiens
AASGFTFSGYLMHWFRQAPGKGLVCVAKISSDGSDTVYADSVRGRFTISRDNAKNTLYLQMNSLTGEDTAVYFCVRDNWGVHHWGQGTLVTVSS

SEQ ID NO: 32260 - protein, 93 aa, Homo sapiens
ASGFIFTDYAMHWVRQGPEKGLMWISRIDGDAIGTLYADSVKGRFSISRDNAKNTLYLQMNSLRAEDTAVYYCVRDNWGVHHWGQGTLVTVSS

SEQ ID NO: 32261 - protein, 102 aa, Homo sapiens
TASDGSISSRNYYWGWIRQPPGKGLEWMGSIFNSGSTYYNPSLKSRITISVDTSKNQFSLKLRSVTAADTAVYYCARQLSVRGVNYNWFDPWGQGTLVTVSS

SEQ ID NO: 32262 - protein, 102 aa, Homo sapiens
TVSDGSITSNTYYWGWIRQPPGKGPEWIGSLFYSGSTYYNPSLKSRVTMSVDTSKNHFYLKLTSVTAADTAVYYCARQLSVRGVNYNWFDPWGQGTLVTVSS

SEQ ID NO: 32263 - protein, 93 aa, Homo sapiens
AASGFTFSGFWMTWVRQAPGKGLEWVANIKPDGNDKYYVDSVKGRFAISRDNAKNSLYLQMNSLRVEDTAVYYCARGRGVECWGQGTLVTVSS

SEQ ID NO: 32264 - protein, 93 aa, Homo sapiens
AASGFSFSNSWMTWVRQAPGKGLEWVANIKQDGSEKYYVDSVKGRFTISRDNGKNSLYLQMNSLRADDTALYYCARGRGVECWGQGTLVTVSS

SEQ ID NO: 32265 - protein, 93 aa, Homo sapiens
TVSGGSLTTYFWTWIRQPPGKGLEWIGYIYYSGTTNYNPSLKSRVTMSVDTSKNQFSLKLSSVTAADTAVYYCARGARYLDYWGQGTLVTVSS

SEQ ID NO: 32266 - protein, 92 aa, Homo sapiens
VSGGSISSYYWTWIRQPPGKGLEWIGYIYYSGSTNYNPSLKSRVTISVDTSKNQFSLRLTSVTAADTAVYYCARGARYLDYWGQGTLVTVSS

SEQ ID NO: 32267 - protein, 103 aa, Homo sapiens
KGFGYRFANYWIGWVRQMPGKGLEWMGIIYPADSDTRYSPSFQGQVTISADKSTSTAYLQWSSLKASDSAIYYCARQGYYYGSGSEYNWFDPWGQGTLVTVSS

SEQ ID NO: 32268 - protein, 103 aa, Homo sapiens
KGFGYSFTNYWIGWVRQMPGKGLEWMGIIYPGDSDTRYSPSFQGQVTISADKSISTAYLHWSSLKASDTAMYYCARQGYYYGSGSEYNWFDPWGQGTLVTVSS

SEQ ID NO: 32269 - protein, 96 aa, Homo sapiens
ASGYTFTYYAIHWVRQAPGQPLEWMGWFNAGNGNTRSSQKFQGRVTFSSDISASTSYMELSSLRSEDTAVYYCARDACSGACYDYWGQGTLVTVSS

SEQ ID NO: 32270 - protein, 96 aa, Homo sapiens
ASGYTFTNYAIHWVRQAPGQRPECMGWINSGNGNIKYSVKFQGRATFTGDISASTAYVELTSLTSEDTAVYYCARDACSGACYDYWGQGTLVTVSS

SEQ ID NO: 32271 - protein, 92 aa, Homo sapiens
VSGISITDFYWSWIRLPPGKGLEWIANIHRSGSTNYNPSLKSRVTISIDTSKNQFSMKLNSVTAADTAIYYCARGSGFFYYWGQGTLVTVSS

SEQ ID NO: 32272 - protein, 93 aa, Homo sapiens
IVSGGSISSYYWSWIRQTPGKGLEWIGYIHYSGSTNYNPSLKSRVTISVDTSKNQFSLKLSSVTAADTAVYYCARGSGFFYYWGQGTLVTVSS

SEQ ID NO: 32273 - protein, 94 aa, Homo sapiens
AASGFTFTSYAMSWVRQAPGKGLEWVSSINDSGDSIYYADSVKGRFTISRDNSKNTLYLRMNSLRAEDTALYYCAKDRIGDGYWGQGTLVTVSS

SEQ ID NO: 32274 - protein, 94 aa, Homo sapiens
GASGFTFSSYAMSWVRQAPGKGLEWVSSISDSGVSTYYAHSVKGRFAVSRDNSKNTLYLQMDSLRAEDTAVYYCAKDRIGDGYWGQGTLVTVSS

SEQ ID NO: 32275 - protein, 97 aa, Homo sapiens
AASGFAFSNWHMNWVRQAPGEGLEWLSYITIGSNAMYYADSVKGRFTISRDDAKNSLYLQMSGLRAEDTAVYYCARDSGHGYSVDYWGPGTLVTVSS

SEQ ID NO: 32276 - protein, 96 aa, Homo sapiens
SSGFPFGSYHMNWVRQAPGKGLEWVSYISHQSVAVYTADSVKGRFTVSRDNAMGSLYLQMNSLRAEDTAVYYCARDSGHGYSVDYWGQGTLVTVSS

SEQ ID NO: 32277 - protein, 96 aa, Homo sapiens
SSGFPFGSYHMNWVRQAPGKGLEWVSYISQQSVAVYTADSVKGRFTVSRDDAMGSLYLQMNSLRAEDTAVYYCARDSGHGYSVDYWGQGTLVTVSS

SEQ ID NO: 32278 - protein, 100 aa, Homo sapiens
AASGFTFSSYAMTWVRQAPGKGLEWVSAISGSGSNTYYADSVTGRFTISRDNSKNTLYLQMNSLRAEDTAVYSCAKDYSSSLRYYGMDVWGHGTTVTVSS

SEQ ID NO: 32279 - protein, 100 aa, Homo sapiens
EASGLTFSSYAMAWVRQAPGKGLEWVSAISGSGDSTYYADSVRGRFTISRDNSKNTLYLQMNSLRVDDTAIYKCAKDYSSSLRYYGMDVWGQGTTVTVSS

SEQ ID NO: 32280 - protein, 96 aa, Homo sapiens
AASEFTFEEHAMHWVRQTPGKGLEWVSGILWDGARIDYANSVKGRFTISTDNAKKSLYLQMNSLRPEDTALYFCVKDINPGGADVWGQGTTVTVSS

SEQ ID NO: 32281 - protein, 96 aa, Homo sapiens
AVSGLTFHDHAMHWVRQAPGKGLEWVSGIFWNSGNTGYSDSVKGRFTISRDTAKNSLYLQMDSLRTEDSALYFCVKDINPGGADVWGPGTTVTVSS

SEQ ID NO: 32282 - protein, 98 aa, Homo sapiens
AASEFTFRSYWFYWVRQPPGKGLVWVSRINMDGSNTYYADSVKGRFTISRDNAKNTLYLQMNSLRVEDTAIYYCARDFPGEHNAFDVWGQGTVVTVSS

SEQ ID NO: 32283 - protein, 98 aa, Homo sapiens
AASGFTFSHYWMHWVRQAPGKGLVWVSRIGFDGSSTSYADSVKGRFTISRDDAKNTLYLQMNSLRAEDTAVYYCARDFPGEHNAFDVWGQGAMVTVSS

SEQ ID NO: 32284 - protein, 95 aa, Homo sapiens
AASGFTFRTYWVNWVRQAPGEGLVWVSLINGDGSTTTYADSVKGRFTISRDNAKNTVYLQMNSLRADDTAVYYCARDYAGSPDYWGQGTLVTVSS

SEQ ID NO: 32285 - protein, 95 aa, Homo sapiens
EASGFPLSNYWMNWVRQAPGKGLVWVSLINGDGRTTVYADPVKGRFTVSRDNAKNTVYLQMNSLRADDTAVYYCARDYAGSPDYWGQGTLVTVSS

SEQ ID NO: 32286 - protein, 104 aa, Homo sapiens
TQTLTLTCTFSGFSLSTSGVGVGWIRQPPGKALEWLALIYWDDDKRYSPSLRSRLTITKDTSKNQVVLTMTNMDPVDTATYYCAHRRGGVFDYWGQGTLVIVSS

SEQ ID NO: 32287 - protein, 104 aa, Homo sapiens
TQTLTLTCTFSGFSLSTSGVGVGWIRQPPGKALEWLALIYWDDDKRYSPSLKNRLTITKDTSKDQVVLTMTNMDPVDTATYYCAHRRGGVFDYWGQGTLVTVSS

SEQ ID NO: 32288 - protein, 94 aa, Homo sapiens
AASGFTVSSNYMNWVRQAPGKGLEWVSVIYSGGSTYYADSVKGRFTISRHNSKNTLYLQMNSLRGEDTAVYYCAREERDGMDVWGQGTTVTVSS

SEQ ID NO: 32289 - protein, 94 aa, Homo sapiens
AASEFTVSSNNMNWVRQAPGKGLEWVSVIYSGGGTYYADSVKGRFTISRDNSRNTLLLQMNSLRGEDTAVYYCAREERDGMDVWGQGTTVTVSS

SEQ ID NO: 32290 - protein, 101 aa, Homo sapiens
EASGFTFDDCAMHWVRQAPGKGLEWVSGINWNSGTVGYADSVKGRFTISRDNAKNSLYLQMNRLTTEDTALYYCVKDRSSTLYYYYGMDVWGQGTTVTVSS

SEQ ID NO: 32291 - protein, 101 aa, Homo sapiens
AASGLTFEDYAMHWVRQTPGRGLEWVSGISWNSDSVGYADSVRGRFFISRDNAKNSLYLQMNGLRPEDTAVYYCVKDRSSTLYYYYGMDVWGQGTTVTVSS

SEQ ID NO: 32292 - protein, 98 aa, Homo sapiens
TVSGGSISSSDYYWGWIRQPPGKGLEWIGSIYYTGSTYYNPSRKSRIIISADTSKNQFSLKLSSVTAADTAVYYCARRGWEFAYFDYWGQGTLVTVSS

SEQ ID NO: 32293 - protein, 98 aa, Homo sapiens
TVSGGSVSSSSYYWGWIRQPPGKGLEWIGSFYYTGSTYYNPSLKSRVTISADTSKNQFSLKLSSVTASDTAVYYCARRGWEFAYFDYWGQGTRVTVSS

SEQ ID NO: 32294 - protein, 95 aa, Homo sapiens
AASGFTFSNYVMSWVRQAPGKGLQWVSAITSGGDGTDYADSVKGRFTISRDNSKNTLYLQMNFLRADDTALYYCARRTSGYKDYWGRGTLVTVSS

SEQ ID NO: 32295 - protein, 95 aa, Homo sapiens
AASGFTFSKYVMSWVRQAPGRGLEWVSAISSGGDSTDYAASVKGRFTISRDNSKDTLYLQMNSLRAEDTAIYYCARRTSGYKDYWGQGTLVSVSS

SEQ ID NO: 32296 - protein, 103 aa, Homo sapiens
AVSGFTFNSYSMNWVRQAPGKGLEWVSSISSSSTYIYYADSVKGRITISRDNAKNSLYLQMNSLRVEDTALYYCARDRYSGYDSNYYYGMDVWGQGTTVTVSS

SEQ ID NO: 32297 - protein, 103 aa, Homo sapiens
AASGFTFSSYSMNWVRQAPGKGLEWVSSISSSSTYIYYADSVKGRFTISRDNAKNSLYLQMNSLRAEDTAFYYCARDRYSGYDSNYYYGMDVWGQGTTVTVSS

SEQ ID NO: 32298 - protein, 106 aa, Homo sapiens
TQTLTLTCTFSEFSLTTSGVGVGWFRQPPGKALEWLALIYWDNDKRYSPSLKSSLTITKDTSKNQVVLTMTNLDPVDTATYFCAHKGDRGDPFDYWGQGTLVTVSS

SEQ ID NO: 32299 - protein, 106 aa, Homo sapiens
TQTLSLTCPFSGFSLRTSAEGVGWFRQPPGKALEWLALIYWDDDKRYNPSLKSRLTITKDTSNSQVVLTMTNVDPVDTATYYCAHKGDRGDPFDYWGQGTLVTVSS

SEQ ID NO: 32300 - protein, 99 aa, Homo sapiens
AASGFTFSDHFMDWFRQAPGKGLEWVGRITNKADGYTTQYAASVKGRFTVSRDDSKNSVSLQMNSLKLEDTAVYYCGRDGMRGGDFDYWGQGIMVTVSS

SEQ ID NO: 32301 - protein, 99 aa, Homo sapiens
VASGFMFSDHNMDWFRRAPGKGLEWVGRARFKVDNYRTEYAASVEGRFIISRDDAKNSLYLQMDSLRTEDTAVYYCGRDGMRGGDFDYWGQGTLVTVSS

SEQ ID NO: 32302 - protein, 95 aa, Homo sapiens
AASGFTFTDYGMHWVRQTPGQGLEWVSLISRDGRATYYADSVKGRFTISRDNTKNSLYLQMNSLRTEDTALYYCAKDIRRPFDYWGLGTLVTVSS

SEQ ID NO: 32303 - protein, 95 aa, Homo sapiens
AASKFTFDDYAMHWVRQAPGKGLEWVSFISGDGTTRYYTDSVKGRFTISRDNSKNFLYLHMNSLRSEDTAFYYCAKDIRRPFDYWGQGTLVTVSS

SEQ ID NO: 32304 - protein, 95 aa, Homo sapiens
AASGLNFDVYYMNWMRQVPGKGLEFISFISDSGHSINYADSVKGRFTISRDNAKNSLFLQMSSLRVEDTAVYYCGSLNWNSIDYWGQGTLVTVSS

SEQ ID NO: 32305 - protein, 95 aa, Homo sapiens
AASGLTFNTAWMSWVRQVPGKGLEYLSHIGESSTHTDYADSVKGRFTISRDSAKKSLYLQMNNLRAEDTAIYYCGSLNWNSIDYWGRGTPVTVSS

SEQ ID NO: 32306 - protein, 100 aa, Homo sapiens
ISGDSVSSNSAAWNWIRQSPSRGLEWLGRTYYRSKWYNHYAVSVKSRIAINADTSKNQFSLQLNSVTPEDTAVYYCARDPADYYYGMDVWGQGTTVTVSS

SEQ ID NO: 32307 - protein, 100 aa, Homo sapiens
ISGDSVSSNSAAWNWIRQSPSRGLEWLGRTYYRSKWYNDYAVSVKSRITINSDTSKNQFSLQLNSVTPEDTAVYYCARDPADYYYGMDVWGQGTTVTVSS

SEQ ID NO: 32308 - protein, 102 aa, Homo sapiens
VVSGFTFSTYWMTWVRQAPGKGLEWVANIKQDGSEVFYVDSVKGRFTISRDNAKNSLYLQMNSLRVEDTAVYYCARDPGIASAGTVGYFDSWGQGTLVTVSS

SEQ ID NO: 32309 - protein, 102 aa, Homo sapiens
AASGFSFTSYWMSWVRQAPGKGLEWVASIKEDGRETHYVDSVKGRFTVSRDNAKNSLYLQMSSLRVEDTAVYFCARDPGIASAGTVGYFDSWGQGTLVTVSS

SEQ ID NO: 32310 - protein, 95 aa, Homo sapiens
ADSGFTFSSENMNWVRQAPGKGLEWISYISSSSHTNYADSLKGRFTISRDNAKRSLYLQINSLRAEDTAVYYCARGQGSSWFAYWGQGTLVTVSS

SEQ ID NO: 32311 - protein, 96 aa, Homo sapiens
AASGFTFSSENMNWVRQAPGKGLEWVSYISSSGSVIKYADSVEGRFTISRDNAKNSLYLQMNSLRDEDTAVYYCARGQGSSWFAYWGQGTLVTVSS

SEQ ID NO: 32312 - protein, 99 aa, Homo sapiens
ASGYTFTSYAMHWVRQAPGQRLEWMGWINAGNGDTKYSQKFQGRVTITRDTSASTAYMELSSLRSEDTAVYYCARGLLWFGELSTLGYWGQGTLVTVSS

SEQ ID NO: 32313 - protein, 99 aa, Homo sapiens
ASGYTFTNYAMHWVRQAPRQRLEWMGWINAGNGNTKYSQKFQGRVTITRDTSANTAYMELSSLRSEDTAVYYCARGLLWFGELSTLGYWGQGTLVTVSS

SEQ ID NO: 32314 - protein, 97 aa, Homo sapiens
AASGFPFSRYSMTWVRQAPGKGLQWVSYISGDSSIVYYADSVKGRFTISRDNADNSLYLQMDTLRAEDTAVYYCARDSGSVGADDYWGQGTLVTVSS

SEQ ID NO: 32315 - protein, 97 aa, Homo sapiens
VVSGFTFSTYSMTWVRQAPGKGLEWVSYIHYSSNIIYYADSVKGRFTISRDNAKNSLYLQMNSLKADDTAVYFCARDSGSVGADDYWGQGTLVTVSS

SEQ ID NO: 32316 - protein, 97 aa, Homo sapiens
VASGFTFSTYSMTWVRQAPGKGLEWVSYIHYSSNIIYYADSVKGRFTISRDNAKNSLYLQMNSLKADDTAVYFCARDSGSVGADDYWGQGTLVTVSS

SEQ ID NO: 32317 - protein, 95 aa, Homo sapiens
ASGYSFTSHGISWVRQAPGQGLEWMGWISVYNGNTNYAQKLQGRVTMTTDTSTSTAYMELRSLRSDDTAVYYCARDRGGATLDYWGQGTLVTVSS

SEQ ID NO: 32318 - protein, 95 aa, Homo sapiens
ASGYTFTSYGISWVRQAPGQGLEWMGWISAYNGNTNYAQTLQGRVTMTTDTSTSTAYMDLRSLRSDDTAVYYCARDRGGATLDYWGQGTLVTVSS

SEQ ID NO: 32319 - protein, 100 aa, Homo sapiens
GASGFIFSDAWMGWVRQAPGKGPEWVGRIKSIPDGGTTDYAAPVKGRFSISRDVSKNTVYLQMNSLKTEDTAIYYCTTDRGITSRPLFDFWGRGILVTVS

SEQ ID NO: 32320 - protein, 101 aa, Homo sapiens
AASGFTFSDAWLSWVRQAPGKGLDWVGRIKSNTAGGTTDYGAPVKGRFTISRDDSRNTVYLQMNSLRSEDAGVYFCTTDRGITSRPLFDFWGLGTLVTVSS

SEQ ID NO: 32321 - protein, 99 aa, Homo sapiens
AASGFTFSNAWMNWVRQAPGKGLEWVARIKSKIDGGTTDYIAPVKGRFTISRDDSKNTLYLQMNSLKTEDTAVYYCTTDIYDRGDFDYWGQGTLVTVSS

SEQ ID NO: 32322 - protein, 98 aa, Homo sapiens
ASGFTFRNAWMSWVRQAPGKGLEWVGRIKSKTDGGTTDYAAPVKGRFSISRDDSKNTLYLQMNSLKTEDTAVYYCTTDIYDRGDFDYWGQGTLVTVSS

SEQ ID NO: 32323 - protein, 96 aa, Homo sapiens
AASGFTLRSYWMNWVRQGPAKGLVWVSRINGDGSFIDYADSVKGRFTISRDSAKNTLYLQMNSLRAEDTAVYYCARGTWKDGLDVWGQGTTVTVSS

SEQ ID NO: 32324 - protein, 96 aa, Homo sapiens
AASGFTLSVKWMNWVRQAPGKGLVWVSRSNGDESFKDYADSVKGRFTISRDNAKNTVYLQMNSLRGEDTAVYYCARGTWKDGLDVWGQGTTVTVSS

SEQ ID NO: 32325 - protein, 96 aa, Homo sapiens
AASGITFSRSWMNWVRQTPGKGLVWISRMNGDGSYIDYADSVKGRFTISRDNAKNTLYVQMNSLRAEDTAVYYCARGTWKDGLDVWGQGTTVTVSS

SEQ ID NO: 32326 - protein, 93 aa, Homo sapiens
AASGFTFSSSAMSWVRQAPGKGLEWVSTIGGSGASTYYADSVKGRFTISRDNSKNTLYLQMNSLTAEDTAIYYCAKEPLFDYWGQGTLVTVSS

SEQ ID NO: 32327 - protein, 93 aa, Homo sapiens
AASGFTFSSNAMSWVRQAPGKGLEWVSIIYSDGSNTYYADSVKGRFTISRDTSRNTLYLQMNSLRAEDTAVYYCAKEPLFDYWGQGTLVTVSS

SEQ ID NO: 32328 - protein, 94 aa, Homo sapiens
KGSGYSFTTYWIAWVRQMPGKGLEWMGIIYPGDSDTRYSPSFQGQVTISADKSISTAYLQWNSLKASDTAMYYCARRSSGYDDWGQGTLVTVSS

SEQ ID NO: 32329 - protein, 94 aa, Homo sapiens
KGSGYSFTSYWIGWVRQMPGKGLEWMGIIYPGDSDTRYSPSFQGQVTISADKSLSTAYLQWSSLKASDTAMYYCARRSSGYDDWGQGTLVTVSS

SEQ ID NO: 32330 - protein, 92 aa, Homo sapiens
VASGFSFSTYEMTWARQAPGKGLEWISSFRGDRTDTYYADSVKGRFTISRDNSKNTVYLQMNSLRVEDTAIYYCVKGGWCDSWGQGTLVTVS

SEQ ID NO: 32331 - protein, 92 aa, Homo sapiens
AASGFTFSNYGMGWVRQAPGKGLEWVSILYSGSTSTYYTDSVKGRFTISRDNSKNTVYLQMNSLRVEDTAVYYCVKGGWCDSWGQGTLVTVS

SEQ ID NO: 32332 - protein, 95 aa, Homo sapiens
ASGDTFTGYYFHWVRRAPGQGLEWVGLINPSYITATNTQKLPGRVTVTRDTSTTTVYLEMSSLRSDDTAVYYCVRELRGGFFDYWGQGTLVTVSS

SEQ ID NO: 32333 - protein, 95 aa, Homo sapiens
ASGYSFVTYLMHWVRQAPGQGLEWLGIVNPNGGDTNYAQKFQGRVTLTRDTSTSTVYMDLSSLRSDDTAVYYCVRELRGGFFDYWGQGTLVTVSS

SEQ ID NO: 32334 - protein, 95 aa, Homo sapiens
AASGFTFSNYWIHWVRQAPGKGLVWVSRINSDGSSTSYAESVKARFTISRDNAKKTVYLQMNSLRVEDTAVYYCARGVRGGMDVWGQGTTVTVSS

SEQ ID NO: 32335 - protein, 95 aa, Homo sapiens
AASGFTFSSNWMYWVRQAPGKGLVWVSHIDSDGSTTSFADSVKGRFTISRDNAKNTLYLQMNSLRAEDTAVYYCARGVRGGMDVWGQGTTVTVSS

SEQ ID NO: 32336 - protein, 98 aa, Homo sapiens
ASGYTFTTYDINWVRQATGQGLEWMGRMNPNSGDTGYAQNFRGRLTMTRYTSISTAYMELSSLTSEDTAVYYCARGAIWFGAYGMDVWGQGTTVIVSS

SEQ ID NO: 32337 - protein, 98 aa, Homo sapiens
ASGYSFTTYDVNWVRQAAGQGLEWMGWMNPNTGGTVYTQKFRGRVTMTRDTTTGTAYMELYSLTSEDTAVYYCARGAIWFGAYGMDVWGHGTAVTVSS

SEQ ID NO: 32338 - protein, 95 aa, Homo sapiens
AASGFTFSSYGIHWVRQAPGKGLEWVALIWFDGSNRYYADSVKGRFTISRDNSKNTLYLQMNSLRVEDTAVYYCAREKLVDLDYWGQGTLVTVSS

SEQ ID NO: 32339 - protein, 95 aa, Homo sapiens
AASGFTFSNYGMHWVRQAPGKGLEWVALIWYDGSNKYYADSVKGRFTISRDNSKNTLYLQMKSLRAEDTAVYYCAREKLVDLDYWGQGSLVSVSS

SEQ ID NO: 32340 - protein, 95 aa, Homo sapiens
AASGFSFSGYWMGWVRQAPGKGLEWVANIKQDGSDKYYVDSVKGRFTISRDNAKNSLYLQMNSLRAEDTALYYCARHGYYYFDYWGQGTLVTVSS

SEQ ID NO: 32341 - protein, 95 aa, Homo sapiens
AVSGFTFSTYWMGWVRQAPGKGLEWVANINQDGGVKYYVDSVKGRFTISRDNAENSLYLQMDSLRAEDTAVYYCARHGYYYFDYWGQGTPVTVSS

SEQ ID NO: 32342 - protein, 93 aa, Homo sapiens
AASGFTFSRYWMSWVRQAPGEGLEWVAHINEDGREKDHVDSVKGRFTISRDNAKNSLYLQMNSLTAEDTAVYYCARKGGAGSWGQGTLVTVSS

SEQ ID NO: 32343 - protein, 93 aa, Homo sapiens
AASGFTFSRYWMSWVRQAPGRGLEWVANINEDGSEKYHVDSVRGRFTISRDNAKNSLYLQMNSLRAEDTAVYHCARKGGAGSWGQGTLVIVSS

SEQ ID NO: 32344 - protein, 93 aa, Homo sapiens
AASGFTFSNYGLNWVRQAPGKGLEWLSFISGSGSTIYYADSVKGRFTISRDNVKNSLYLQMNSLRDEDTAVYYCARALGADYWGQGTLVTVSS

SEQ ID NO: 32345 - protein, 93 aa, Homo sapiens
AASGFTFSSYSMNWVRQAPGKGLEWLSYISTSGTTMFYADSVKGRFTISRDNAKNSLYLQMNSLRDEDTAVYYCARALGADYWGQGTLVTVSS

SEQ ID NO: 32346 - protein, 97 aa, Homo sapiens
AASRFSFSTYAMHWVRQVPGKGLEWVALISFNGKNKYYRDSVKGRFTISRDNSNNTLYLQMNSLRVEDTGLYYCMRGHYDSSAPDYWGPGTLVTVSS

SEQ ID NO: 32347 - protein, 97 aa, Homo sapiens
AASRFAFSTYAMHWVRQVPGKGLEWLALISFNGRNQFYTDSVKGRFTISRDNSQNTLYLKLNSLRPEDTGLYYCMRGHYDSSAPDYWGQGTLVIVSS

SEQ ID NO: 32348 - protein, 94 aa, Homo sapiens
AASGFTFSDYYMNWIRQAPGKGLEWVSYISSSGSVIYYADSVKGRFTISRDNAKNSLYLQMNSLRAEDTAVYYCARAAGWIDPWGQGTLVTVSS

SEQ ID NO: 32349 - protein, 94 aa, Homo sapiens
AASGFTFSDYYMNWIRQAPGKGLEWVSYISNSGSAVYYADSVKGRFTISRDNAKNSLYLQMNSLRAEDTAVYYCARAAGWIDPWGQGTLVTVSS

SEQ ID NO: 32350 - protein, 94 aa, Homo sapiens
AASGFTFSDYYMNWIRQAPGKGLEWVSYISSSGSAIYYADSVRGRFTISRDNAKNSLYLQMNSLRAEDTAVYYCARAAGWIDPWGQGTLVTVSS

SEQ ID NO: 32351 - protein, 94 aa, Homo sapiens
AASGFTFSDYYMTWIRQAPGKGLEWVSSIGSSNSLRSYADSVKGRFTISRDNAKKSLYLQMNSLRPEDTAMYYCARAAGWIDPWGQETLVTVSS

SEQ ID NO: 32352 - protein, 94 aa, Homo sapiens
AASGFTFSDYYMTWIRQAPGKGLEWVSSIGSSNSPRSYADSVKGRFTISRDNAKKSLYLQMNSLRPEDTAMYYCARAAGWIDPWGQGTLVTVSS

SEQ ID NO: 32353 - protein, 92 aa, Homo sapiens
VASGFVGDYYMTWIRQAPGKGLQCVAYIGYGDGTLFYASSVKGRFSISRDDARNSAYLQMNRLRTDDTAVYYCARGLSLDVWGQGATVTVSS

SEQ ID NO: 32354 - protein, 93 aa, Homo sapiens
VTSGFTFSDYYMTWIRQAPGKGLQCVSYLGNGDGTVYYADSVKGRFTISRDDAKKSVSLEMDSLRADDTAVYYCARGLSLDVWGQGTTVTVSS

SEQ ID NO: 32355 - protein, 102 aa, Homo sapiens
AASGFTFSDHYMDWVRQAPGKGLEWVGRARNKANSYTTEYAPSVKGRFTVSRDDSKSSLYLQMNSLQTEDTAVYYCVRVRGSSWSDHYFDYWGQGSLVTVSS

SEQ ID NO: 32356 - protein, 102 aa, Homo sapiens
AASGFTFSDHYMDWVRQAPGKGLEWVGRTRNKANGYTTEYAASVKGRFTISRDDSQNSLYLQMNSLKAEDTAVYYCVRVRGSSWSDHYFDYWGQGTLVTVSS

SEQ ID NO: 32357 - protein, 95 aa, Homo sapiens
ATSGFTFSGYWLNWVRQVPGKGLVWVALINPDGSRTTYADSVRGRFTISRDNAQNTGYLQMNSLRADDTAVYYCARDLRGSPDYWGQGTLVTVSS

SEQ ID NO: 32358 - protein, 95 aa, Homo sapiens
AASGFTFSTYWMNWVRQAPGKGLVWVSLINPDGSSITYADSVKGRFTISRDNAKNTVYLEMNSLRAEDSAVYYCARDLRGSPDYWGQGTLVTVSS

SEQ ID NO: 32359 - protein, 101 aa, Homo sapiens
AASGFTFSSYEMNWVRQAPGKGLEWVSYISSSGSTIYYADSVKGRFTISRDNTKNSLYLQLNSLRAEDTAVYYCAREGGGFNYYYYGMDVWGQGTTVTVSS

SEQ ID NO: 32360 - protein, 101 aa, Homo sapiens
AASGFTFSSWQMNWVRQAPGRGLEWVSHISSSGSTIYYADFVKGRFTISRDNAKNSLYLQMNSLRAEDTALYYCAREGGGFNYYYYGMDVWGQGTTVTVSS

SEQ ID NO: 32361 - protein, 95 aa, Homo sapiens
AASGFTLNTYWMTWVRQAPGKGLEWVANINQDGSVKYYVGSVKGRFTVSRDDAENSFYLQMNDLRVDDTAVYYCARAIAAPGSLWGQGTLVTVSS

SEQ ID NO: 32362 - protein, 95 aa, Homo sapiens
AASGFSLSNYWMSWVRQAPGKGLEWVANIRQDGSEKYYVDSVKGRFNIYRDNAKNSVFLQMNSLRAEDTAVYYCARAIAAPGSLWGQGTLVTVSS

SEQ ID NO: 32363 - protein, 89 aa, Homo sapiens
ASGYTFTRYAMNWVRQAPGQGLEWMGWINTNTGNPTYAQGFTGRFVFSLDTSVSTAYLQISSLKAEDTAVYYCTRRDYWGQGTLVTVSS

SEQ ID NO: 32364 - protein, 89 aa, Homo sapiens
ASGYTFTTYAINWVRQAPGQGLEWMGWINTNTGNPTYAQGFTGRFVFSLDTSVSATYLQISNLKAEDTAFYYCTRRDYWGQGTLVTVSS

SEQ ID NO: 32365 - protein, 96 aa, Homo sapiens
ASGYSFTSYDINWVRQAPGQGLEWLGWMNPNKGYTGYSQKFQGRVTMTRDTSVSTAYMELSSLTSEDTAVYYCARNLAYTGDFDYWGQGALVTVSS

SEQ ID NO: 32366 - protein, 96 aa, Homo sapiens
ASGYTFTNYDINWVRQATGQGLEWMGWMNPNSGNTGYAQKFQGRVTMTRDTSISTAYMELSSLRSEDTAVYYCARNLAYTGDFDYWGQGTLVTVSS

SEQ ID NO: 32367 - protein, 102 aa, Homo sapiens
AASGFTFSSYAMHWVRQAPGKGLEYVSGISSNGGSRYYANSVKGRFTISRDNSKNTLYLQMGSLRAEDMAVYYCARVPTYYYDSSGYYYDYWGQGTLVTVSS

SEQ ID NO: 32368 - protein, 102 aa, Homo sapiens
AASGFTFSSYAMHWVRQAPGKGLEYVSAISSNGGSTYYANSVKGRFTISRDNSKNTLYLQMGSLRAEDMAVYYCARVPTYYYDSSGYYYDYWGQGTLVTVSS

SEQ ID NO: 32369 - protein, 95 aa, Homo sapiens
AASGFTFSSYWMTWVRQAPGKGLECVATINQGGSEPYYVDSVKGRFTISRDNTKTSLFLQMSSLRAEDTAVYYCARAIDHATDYWGQGTLVTVSS

SEQ ID NO: 32370 - protein, 95 aa, Homo sapiens
AASGFAFGSEWMSWVRQTPGKGLEWLANINPDASEKHHVDSMEGRFTISRDNVRNSLYLQMNSLRAEDTGIYYCARAIDHATDYWGQGTLVTVSS

SEQ ID NO: 32371 - protein, 95 aa, Homo sapiens; identical to SEQ ID NO: 32370

SEQ ID NO: 32372 - protein, 97 aa, Homo sapiens
TVSGGSISSGSYYWAWIRQPPGKGLEWIGTFSYTGNTYYNPSLKSRVTISVDTSKNHFSLELTSVTAADTALYYCARHYRPYGMDVWGQGTTVTVSS

SEQ ID NO: 32373 - protein, 97 aa, Homo sapiens
TVSGDSTSTTTYYRAWIRQPPGKGLEWIATISYTGTTYYDPSLKSRVTISEDTPKKQFSLKLSSVTAADTAVYFCARHYRPYGMDVWGQGTTVTVSS

SEQ ID NO: 32374 - protein, 91 aa, Homo sapiens
AASGLSFSNNWMDWVRQVPGKGLVWVSRISGDGRKTYYADSVKGRFTISKDNANNILYLQMNSLRVDDAAVYYCLRPWDYWGQGTLVTVSS

SEQ ID NO: 32375 - protein, 91 aa, Homo sapiens
AASGFTFSSYWMHWVRQAPGKGLVWVSRIYSDGSSTSYADSVKGRFTISRDNAKNTLYLQMNGLRAEDTAVYYCLRPWDYWGQGTLVTVSS

SEQ ID NO: 32376 - protein, 100 aa, Homo sapiens
AASGFTFSSFAMSWVCQAPGKGLEWVSTITGSGDYTYYADSVKGRFTISRDNSKNTLSLQMDSLSAEDTAVYYCAKHTRAGYYYYGMDVWGQGTTVTVSS

SEQ ID NO: 32377 - protein, 100 aa, Homo sapiens
AASGFTFSSYAMSWVRQAPGKGLEWVSGISGSGGSTYYADSVKGRFTISRDSSKNTLYVQMNSLRAEDTAVYYCAKHTRAGYYYYGMDVWGQGTTVTVSS

SEQ ID NO: 32378 - protein, 95 aa, Homo sapiens
AASGFTFGNVWMSWVRQVPGKGLEWVGRIKSKHNGGTPDYAAPVKGRFGISRDDSKDTLFLHMNSLKVEDTAVYYCAREPDFDYWGQGTQVTVSS

SEQ ID NO: 32379 - protein, 95 aa, Homo sapiens
EASGFTFSNVWMSWIRQAPGKGLEWVGRIKSKYHGGTTDYAAPVRGRFFISRDDSKNTLFLQMNNLKIDDTAVYYCAREPDFDYWGQGTLVTVSS

SEQ ID NO: 32380 - protein, 95 aa, Homo sapiens
AASGFTFSNVWMSWVRQAPGKGLEWVGRIKSKFHGGTTDYAAPVRGRFFISRDDSKNTLFLQMNNLKIDDTAVYYCAREPDFDYWGQGTLVTVSS

SEQ ID NO: 32381 - protein, 94 aa, Homo sapiens
AASGFTFSAAWLGWVRQTPGTGLEWVANIREDGGERYYVDSVKGRFTISRDNANNLLYLQMNSLRVDDTAVFYCARGGAFLDYWGQGTLVIVSS

SEQ ID NO: 32382 - protein, 94 aa, Homo sapiens
AASGFTFNTYWMGWVRQTPEKGLEWVANIKTDGSDKYYVDSVKGRFTISRDNAQKSMYLEMNSLRAEDTAVYYCARGGAFLDYWGQGTLVTVSS

SEQ ID NO: 32383 - protein, 103 aa, Homo sapiens
AASGFTFSNHGMHWVRQVPGKGLEWVAVISGDGSDNQFADSVKGRFSISRDNSKNRVYLQMNNVRDEDTALYYCAREGRCGEPKCYSGLPDYWGQGTLVSVSS

SEQ ID NO: 32384 - protein, 103 aa, Homo sapiens
AASGFIFDKHAIHWIRQVPGKGLEWVAAISQEGADQRYLDSVKGRFFISRDNSRNTAYLELSSLRPEDTALYFCAREGRCGEPKCYSGLPDYWGQGALVTVSS

SEQ ID NO: 32385 - protein, 94 aa, Homo sapiens
AASGFTFSDYYMTWIRQAPGKGLQWVSYITNTGSSKYYADSVAGRFTVSRDNDHSVLYLQMTNLRAEDTAFYYCARGTGSHIHWGQGTLVTVSS

SEQ ID NO: 32386 - protein, 94 aa, Homo sapiens
VASGFSFSDYYMTWIRQAPGKGLEWVGYITKSANNIYYADSVEGRFTISRDNAENSLFLQMNSLRPEDTAIYYCARGTGSHIHWGQGTLVSVSS

SEQ ID NO: 32387 - protein, 93 aa, Homo sapiens
VASGFTFSSFDMSWVRQAPGKGLEWVSVIYSGGRGADYVDSVKGRFTISRDDSKNTLYLQMNSLRTEDTAVYYCARGGWLANWGQGTLVTVSS

SEQ ID NO: 32388 - protein, 93 aa, Homo sapiens
AASGFTFSDTDMSWVRQAPGKGLDWVSVIYSGDRTTYYANSVKGRFTISRDDSNNTLYLQMSSLRAEDTAVYYCARGGWLANWGQGTLVTVSS

SEQ ID NO: 32389 - protein, 94 aa, Homo sapiens
AASGFTFSAFEMAWVRQAPGQGLEWVSLISLSDSSGTYYKDSVKGRFTVSRDNSKSTLYLHMNSLRDEDTAIYYCARGGWLANWGPGTLVTVSS

SEQ ID NO: 32390 - protein, 100 aa, Homo sapiens
ASGFTFNNAWMIWVRQAPGKGLEWVGRIKSETDGGRADYAAPVKGRFTISRDDSKNTVYLQMNSLKTEDTAVYYCTTRSIPYYYYGMDVWGQGTTVTVSS

SEQ ID NO: 32391 - protein, 101 aa, Homo sapiens
AASGFTFSNAWMSWVRQAPGKGLEWVGRIKNTGDGGTIDYAAPVKGRFTISRDDSKDTLHLQLNSLKTEDTAVYYCTTRSIPYYYYGMDVWGQGTTVTVSS

SEQ ID NO: 32392 - protein, 97 aa, Homo sapiens
AASGFTVRSNYMSWVRQAPGKGLEWVSVIYSGGTTYYADSVKGRFTISRDNSKNILYLEMNSLRAEDTAVYYCARDRSSGWYSFDYWGQGTLVTVSS

SEQ ID NO: 32393 - protein, 97 aa, Homo sapiens
AASGFIVGNNYMSWVRQAPGKGLEWVSLIYSGGGTYYADSVKGRFTVSRDNSKNTLYLQMNSLRAEDTALYYCARDRSSGWYSFDYWGQGALVTVSS

SEQ ID NO: 32394 - protein, 94 aa, Homo sapiens
TSGLTFSDYWMNWVRQAPGKGLEWVAIIKNDGVEKKYVDSVRGRFTISRDNAENSVYLQMDSLRADDTAVYYCVAGRGWQPDYWGQGALVTVSS

SEQ ID NO: 32395 - protein, 95 aa, Homo sapiens
ATSGITFSEFWMNWVRQAPGKGLEWVANIEQDGNEKNYVDSVKGRFTISRDNAKNLAFLQMNSLRAEDTAVYYCVAGRGWQPDYWGQGTLVTVSS

SEQ ID NO: 32396 - protein, 12 aa, Homo sapiens
AGDWNDDDIFDY

SEQ ID NO: 32397 - protein, 12 aa, Homo sapiens
ARGSGWYDAFDI

SEQ ID NO: 32398 - protein, 8 aa, Homo sapiens
AGGRSFDY

SEQ ID NO: 32399 - protein, 12 aa, Homo sapiens
AREGGSGYSFDY

SEQ ID NO: 32400 - protein, 17 aa, Homo sapiens
SRGCSGGSCYYYYGMDV

SEQ ID NO: 32401 - protein, 13 aa, Homo sapiens
ARSRGYSAYEFDY

SEQ ID NO: 32402 - protein, 9 aa, Homo sapiens
ARESSGFDY

SEQ ID NO: 32403 - protein, 14 aa, Homo sapiens
AKGRNYYDSSGYYS

SEQ ID NO: 32404 - protein, 13 aa, Homo sapiens
AKSLGSGTYSFDY

SEQ ID NO: 32405 - protein, 8 aa, Homo sapiens
ARADILRP

SEQ ID NO: 32406 - protein, 9 aa, Homo sapiens
ARTYNYMDV

SEQ ID NO: 32407 - protein, 19 aa, Homo sapiens
ARDKSLVYYASGSSNAFDI

SEQ ID NO: 32408 - protein, 8 aa, Homo sapiens
ARGLQVDY

SEQ ID NO: 32409 - protein, 12 aa, Homo sapiens
AKDSGGPYYFDS

SEQ ID NO: 32410 - protein, 12 aa, Homo sapiens
ARGAYSGYDFDY

SEQ ID NO: 32411 - protein, 14 aa, Homo sapiens
ARFYYGSGSPQTDY

SEQ ID NO: 32412 - protein, 10 aa, Homo sapiens
TRPYYDNTGY

SEQ ID NO: 32413 - protein, 11 aa, Homo sapiens
AKDELPYGMDV

SEQ ID NO: 32414 - protein, 13 aa, Homo sapiens
AKDNYGSGSYFDY

SEQ ID NO: 32415 - protein, 9 aa, Homo sapiens
ARGDYGGDY

SEQ ID NO: 32416 - protein, 11 aa, Homo sapiens
ARGPWTEYFQL

SEQ ID NO: 32417 - protein, 11 aa, Homo sapiens
ARGGGTVTTDY

SEQ ID NO: 32418 - protein, 9 aa, Homo sapiens
ARRWDGLDV

SEQ ID NO: 32419 - protein, 13 aa, Homo sapiens
VRDSHGGKVHLEY

SEQ ID NO: 32420 - protein, 8 aa, Homo sapiens
ARNRGISH

SEQ ID NO: 32421 - protein, 10 aa, Homo sapiens
ARKGEQLWHY

SEQ ID NO: 32422 - protein, 8 aa, Homo sapiens
SRGRDGIG

SEQ ID NO: 32423 - protein, 12 aa, Homo sapiens
AGDWNDDDIFDY

SEQ ID NO: 32424 - protein, 8 aa, Homo sapiens
ASGGDCDS

SEQ ID NO: 32425 - protein, 9 aa, Homo sapiens
STDDPRWPH

SEQ ID NO: 32426 - protein, 12 aa, Homo sapiens
VRGSNDWNGVDY

SEQ ID NO: 32427 - protein, 15 aa, Homo sapiens
VRRMSGTSYDYGMDV

SEQ ID NO: 32428 - protein, 12 aa, Homo sapiens
VRGGGSGWPFES

SEQ ID NO: 32429 - protein, 6 aa, Homo sapiens
SWTLAY

SEQ ID NO: 32430 - protein, 9 aa, Homo sapiens
ARRGDYFNS

SEQ ID NO: 32431 - protein, 11 aa, Homo sapiens
LVVPDPYGMDV

SEQ ID NO: 32432 - protein, 9 aa, Homo sapiens
ATQGGFLDF

SEQ ID NO: 32433 - protein, 9 aa, Homo sapiens
VRLAEYFQD

SEQ ID NO: 32434 - protein, 12 aa, Homo sapiens
ARHGDYGDYLYY

SEQ ID NO: 32435 - protein, 14 aa, Homo sapiens
ARDLDGYNPGPFDY

SEQ ID NO: 32436 - protein, 11 aa, Homo sapiens
ARGGFSWSFDY

SEQ ID NO: 32437 - protein, 16 aa, Homo sapiens
AREYYDILTGQIPLDY

SEQ ID NO: 32438 - protein, 13 aa, Homo sapiens
ARAPSNAWHNFDY

SEQ ID NO: 32439 - protein, 12 aa, Homo sapiens
ARRAGGAEYFQH

SEQ ID NO: 32440 - protein, 10 aa, Homo sapiens
AADPGLLTYY

SEQ ID NO: 32441 - protein, 14 aa, Homo sapiens
ARDRDGDSNWYFDL

SEQ ID NO: 32442 - protein, 13 aa, Homo sapiens
AKNLVDGQALYEY

SEQ ID NO: 32443 - protein, 14 aa, Homo sapiens
AREDWKDGDDAFDI

SEQ ID NO: 32444 - protein, 12 aa, Homo sapiens
ASLSRDGYNSDY

SEQ ID NO: 32445 - protein, 20 aa, Homo sapiens
ARDRVTMVRGEAYHYYGMDV

SEQ ID NO: 32446 - protein, 7 aa, Homo sapiens
VRGLGEM

SEQ ID NO: 32447 - protein, 9 aa, Homo sapiens
AGGNGYNLY

SEQ ID NO: 32448 - protein, 12 aa, Homo sapiens
ARLYSGDDFFDY

SEQ ID NO: 32449 - protein, 11 aa, Homo sapiens
ARGWRENSFDY

SEQ ID NO: 32450 - protein, 10 aa, Homo sapiens
ASKITDDFDY

SEQ ID NO: 32451 - protein, 13 aa, Homo sapiens
AKDPPESGTTFDY

SEQ ID NO: 32452 - protein, 10 aa, Homo sapiens
ARGVQWGFDS

SEQ ID NO: 32453 - protein, 12 aa, Homo sapiens
ARPGPGYDAFDI

SEQ ID NO: 32454 - protein, 12 aa, Homo sapiens
ARFGGSGWSLDY

SEQ ID NO: 32455 - protein, 5 aa, Homo sapiens
ARRGY

SEQ ID NO: 32456 - protein, 7 aa, Homo sapiens
TTGAMDV

SEQ ID NO: 32457 - protein, 17 aa, Homo sapiens
ARGYYDSSGNSNWYFDL

SEQ ID NO: 32458 - protein, 9 aa, Homo sapiens
ARGSPYFDL

SEQ ID NO: 32459 - protein, 6 aa, Homo sapiens
LRSFDT

SEQ ID NO: 32460 - protein, 18 aa, Homo sapiens
ARAHYDILTGSSLNWFDP

SEQ ID NO: 32461 - protein, 9 aa, Homo sapiens
VRGTTGMDV

SEQ ID NO: 32462 - protein, 14 aa, Homo sapiens
ARSRSGSYYYGMDV

SEQ ID NO: 32463 - protein, 9 aa, Homo sapiens
VRGSAHLRY

SEQ ID NO: 32464 - protein, 14 aa, Homo sapiens
AREEYSSGWYYFDY

SEQ ID NO: 32465 - protein, 9 aa, Homo sapiens
AKDRGGSDY

SEQ ID NO: 32466 - protein, 9 aa, Homo sapiens
ARHSDWFDP

SEQ ID NO: 32467 - protein, 12 aa, Homo sapiens
ARGGMVQGDIDY

SEQ ID NO: 32468 - protein, 14 aa, Homo sapiens
AKDLGLGYNATFDH

SEQ ID NO: 32469 - protein, 18 aa, Homo sapiens
ARGDYYDSSGDYHDVFDI

SEQ ID NO: 32470 - protein, 11 aa, Homo sapiens
ERDVRFGLFDY

SEQ ID NO: 32471 - protein, 11 aa, Homo sapiens
ARDKGTYYFDQ

SEQ ID NO: 32472 - protein, 8 aa, Homo sapiens
ARTVACEV

SEQ ID NO: 32473 - protein, 11 aa, Homo sapiens
AVSGDGGYSHD

SEQ ID NO: 32474 - protein, 14 aa, Homo sapiens
ATDRTDYGDYRFDY

SEQ ID NO: 32475 - protein, 17 aa, Homo sapiens
ARFGGSMVRGLGGWFDP

SEQ ID NO: 32476 - protein, 5 aa, Homo sapiens
AKDYV

SEQ ID NO: 32477 - protein, 11 aa, Homo sapiens
TTDFLRGFFGS

SEQ ID NO: 32478 - protein, 10 aa, Homo sapiens
ARSVQGAFDN

SEQ ID NO: 32479 - protein, 10 aa, Homo sapiens
ARDLSWNFDY

SEQ ID NO: 32480 - protein, 9 aa, Homo sapiens
TSDPNWVDY

SEQ ID NO: 32481 - protein, 10 aa, Homo sapiens
ARFQTGGLDY
